United States Patent Application Publication US 2023/0390346 A1 - sequence listing, part 15

SEQ ID NO: 262 - DNA, 3968902 bp, Bacillus amyloliquefaciens (residues 1-1,984,451 of 3,968,902)
tttggactgaatgaaatatttaattcctcgccgtcaatctggtcagccagcacagcttcgaccactttcccgatttccggagaatttgatgaaatctccagcgaatccgccggtttggcagaaagctttacaacgttgttgcggccttctctcgccaataaagaagcacggtctatcgcctgtaaaaattccttcgtgttcacgacgatttccgttttgctttcctgcggaattaagctggtcgtgtccggatagtttccgtcaagcaatcttgagaagaacaatacgtttttcgctttgaacagaacttgggtttctgtaatgacgatatcaaccagttcttggttgtcatcaagaattttgctcagctcggttaagcttttcccaggaatgaccacgttataagagctgtcttccggaatatcaagcttcgcctttcttaaagcgagtcggtggctatccgtggcagtgcataataattcaccgttttcgactttccagtttacacctgtcaagatagggcgtgtttctgaggcggacacagcgaacacggtttggcgaatcaggtttttcaaaagatccgtcggaatctgaatggcgtgatgctcttcgatttgcggcagatgcggatattcatctgcatcaaggccgtttaaattaaattcggcttttccggaacggataatcgttaaatattgattttgaacttcgatttcaacagtcgccatcggaagttttttaacgatttcgctgaagaaacgggcttgcagcacgatacttcccggctgatcgatcgtcacgatttctttatcatcttcttctttcggaatgaatgactcgattgaaatatcagagtcacttcctgtgaaagatactccttcatctgaggcgacgatcttaataccggtgagaatgggaattgtggttctggatgaaacggcttttagaacgtcttgtacactttcgactaaacgatctttttgaatcgtaaatttcatgtttatcctcctaacggataatataattaatatattttaaaaatagcagtagtaatagtagggcctgtggatttgtggataagttgtgaaaaagacaggaaacacagcctatccacatgtggacagactgtgtatggctatgaaaaagttattcacactttccccgattcatccgagggcactattatttaagcagttcttttatttctttcacctgctgctgaagctgctcgtcatcaatcagcagttttgaaatcttttcatgggcgtgaatgacggttgtatggtctctgccgccaaattcttccccgattttaggcaaagaagaatccgtcatttctcttgaaagatacatcgcaatttgtcttgggaacgccacggatttcgtgcgctttttcgctttgaaatcttcaagcttaatgttgaactgctgtccgacaatccgctgaatctcttttatcgtaatgaccttcggcttagaagacggaatgatatctttcaatgcttctgcagccaggtctgcgttaatgtctttattgattaaggatgaataggcgacaacccggattaatgccccttccagttcgcggatgttgctgtcaatctgattcgcgatgtaaagcatgacctcgttcggaatatcaagaccttccgccttcgctttttttctcaggatggcaatccgcgtttccagatccggcggtgtgatatccgtaatcaatccccattcgaaccgcgaacgcaggcggtcttcaagggttgggatctctttcggcggtctgtcgctggaaatcacgatttgtttgctttcttcatgaagcgtgttgaatgtatggaaaaactcttcctgtgtttgttcttttccggctaaaaattgaatatcatctatcaaaagtacatcaacgttccggtagcgattgcggaaatcaacggctttattatcgcggattgagttgatgaattcatttgtgaatttttcagaagacaggtacaccactttggctgaaggattatgatcaatgacataatggccgatcgcgtgcattaagtgggtttttcctaagccgactcccccgtatataaataaagggttgtacgctttagcgggtgcttccgccacagccagtgatgctgcatgggcgaatcggtttcccgatccgatgacgaatgtgtcgaatgtatatttcgggttgagcatgctttggggaaaatcagacggttcctcttttgccgcttttttcacttgcggtttcggtaaaaagttttcttcgtcctgattttgaggaatgacaaatttgacgctcaattcttccccggttaattcgtatatggtatctgcaatgagatgtaagtacctggactccagccagtctcgggcaaattcattgggagcggtgatggttaaggtatccccttgcagcgaatgggctttcgtcgacttcatccaagtttcgaaactcggtttgcttagctttttctcaatttgagctagagcttgattccaaagatccaatatattctccattatccggcacagccctccttttctttaaaaatcagcgccctttccctgttatagaacacaaaaaaagagcatatggctctgaccattcgtacacacgaaatgttgaaaacatatagtatagtagaaaaacagcttttcgacaaattccacaagttgtggacaacaatctacacaagctgtgtgaaaacaatccacaacttatccacagtttgtggataaagagaatgggctggataagtaattaagagttaaaacacaaatataatatcaaattaagcgaggacttgcaatggttctcgtaatcttatccacaaacctgacaacttgttgaaaaatctttgtccacatgggttagcaatgtgaaaatgttgtcgataacgactgtggatattaaaaaaaggccaaaaaattatccacatgtcgtttttccgggggagcgcggcttttttttttgcgttaaaaaaaggaatatgaaaaataaggtttctaaactggttaaggtatgttatcctattatggttgtaagaaataaaagcactgctgaagttgacaatgaataggcagcacaaatataataagtaagactgtctttaacagctattcctcgagggaggtgtcataaatgaaaagaacattccaaccgaataaccgtaaacgcagtaaagttcatggcttcagaagccgtatgagttcaaaaaacggtcgtctagtattagcacgccgtcgccgcaaaggcagaaaagtattatcagcttaggccactgaataatgtcagtggtcttttttcacattaagagagtgagatgtcatgcgtcgcccggtactggagaaatttcttcagtattccggcggcccgttttttttagatagaaataaaagtttctgcgagtgaatatcggagtgaattaaagtgaagaagcgaaatcggttaaagaaaaatgaagattttcaaaaagtgtttaaacgcggaacgtctatggcaaaccgccagttcgtgctgtatacgcttgatcagccgaaacaggaagagctccgggtagggctttctgtcagtaaaaaaatcggcaatgccgtcgtgcgcaatcgggtgaagcggttaatcagacaggctgttcaggaggaaaaagagctgctcaagccgaaagattttattattatcgcaagaaaacccgccggcgacctcagttttgaagaaacgaaaaagagtctgcagcacttattcagaaaaacctcattatataagaaatcttcgtcaaaatagctcatattttgttttcttcacgtttttaaaagcgcttccttttatttggcgaaaaatgaacgccatttgaaactgaaagatgctaaaatacatacaaggttcataaagattggtataggaggaaacgttcttgaaaaggagaatatggttactactgagtatggtcggtatgctcgtgctgctggccgggtgctcgagtgtgaaagagccgattacggcgaatagtccgcatttctgggacaaatatgttgtgtatccattgtcagaagttattacgtacgtagcgaaactgacgggcgataactatggtttatcgatcatcatcgttacgattttaattcgtctgctgattctgccgctgatgatcaagcagcttcgaagctcaaaagcgatgcaggcgctgcagcctgaaatgcagaagctcagagaaaaatacagctctaaagatcaaaaaacgcagcagaagcttcagcaggaaacgatggccctgttttcaaagcacggggtaaacccgctggcgggatgtttcccgatcctgattcaaatgccgattttgatcggattctaccacgccattatgcgtacgcaagccatatcacagcacagctttttatggtttgatttaggagagaaggatccttactatattcttcctatcgttgccggtgtggccacttttgtccagcagaagctgatgatggccggaaatccgactcagaatcctcaaatggcaatgatggtatggattatgccgatcatgatcatcgtatttgcgatcaacttcccgagcgcgctttctctgtattgggtagtcggaaacctgtttatgattgctcagacattccttattaaaggacctgacattaaacacgatccggaaacgcagaaagcgggaggaaagaaaaagtgaagaaggtgactgctgcgggacggaatgtcgaagaagcagttcaatcaggccttcaggaacttcaactgacgaaagatcaagtagaaataacggtggtgcaagaagaatacaaagggtttttgggtattttcggaaaaaagaatgcgatcgtagaactggaagagaaaaaaaatcctgttcatgaagcgaaagtgtatttggaagaaatcatccattccattgccggaccttctgagattgttacggaagaaaacaagaaaacagtctgttttcacattaaaggtgaaaaagcggcgctgcttattggcaaaagaggacaaacactcaatgccctggaaacattgacgcagcttgttttgaaccgcggctccggccagtatcgccaagccgttgtcgacgctgagaattatcggcggaaaagaagagaaattctggagcagctggcaaacaggctggccaagcaagtgtcgaaaacgaaaaaagatgtgcatttagaaccgatgccgtcaggtgaaagaaaaatcatccatgacgcgctgtcaaagcatccaaatatcaaaacgttttctaccggtgaaggccggtaccgccatctcgttatttcccataaagatagcagaaaaccgaagtccgggtaaaatcggaacttcggtttttttattggtaaaaatggctctattcctaagcagaatcgcactttttgcgtttaagttttttctttttcggtctatgctgttgataaaaaaggttttaggaaataaaattaattgttattcacatgtggataagttaaagtaataagggatgaatttctgcctttgtggataacgtatcttccacttcaaaccaaactatgttatcttttaattttggcgtaaataaaattttttatatagatggaaacagagataaagagaggtgaacagcatggatacaattgcagcgatttcaactccgatgggtgaaggcgcgattgcgatcgttcggctgagcggccctgaagccgtaaagatcgccgacaaaatgtacaagggtccgaaaggcaaaacgctcagttcggcagaatcgcataccattcattacgggcatatcgcggacagcacgacgggacggattattgaggaagtcatggtgtctgttttaagagcgcccagaacattcacaagggaagatgtcattgaaatcaactgtcatgggggtattgtgacggttaatcaggtgctccagcttgctttaagagaaggtgcgagactggcagaacccggtgagtttacgaagcgcgcatttttaaacggacggattgacctttcacaggcggaagcggtgatggatctgatcagggccaaaacggaccgtgccatgaatgtcgccatgaaccagatggaaggacggctttccgcgcttgtccgccgtctgcgtgatgagttgttagaaacacttgcccatgttgaggttaatatagattatccggaatatgatgacgtcgaagaaatgacgcatcagcttttagtggagaaggcaagcggcgtgaagaaagaaatcgaggcgctgctccgtacgtctgagcaggggaaaattttgcgtgagggactgtctaccgtgatcatcggccgtccgaacgtcggaaaatcctctctgcttaacagccttgtccatgaaacgaaggcgatcgtaactgatattccgggaacgacgcgtgatgtgattgaggaatatgtcaatgtccgaggcgtgccgcttcggcttgtcgataccgccggaatccgtgagacagaagacatcgtcgaaagaatcggtgtggaacggtcacggcaggttctgaaggaagcggatctcattttgcttgtgcttaaccacagcgaagagctttctgaagaagatgtgaaattgtttgaagcggttgagggaatggatgtcattgtcactatgaataagacggaccttgaggctaagattgacgctgagcgcgtcaaggaactggcgaaaggccggcctgtcgtcacgacctcattgctgaaagaagaaggcattcaagatttagaggaagcgattcagtcgctattttatacaggagcgatcgaaagcggagatctcacctatgtcagcaacacccgtcatatctcgattctgcatcaggcaaagcaagcgattgatgatgcgctgaacggaattgaacaggatgttccgattgatatggtgcaaattgatttgacaaggtgctgggagctgctgggcgaaatcatcggtgatgccgtccacgaaagcttaattgatcagctcttttcacaattttgtttaggtaaataaaagggaggaaaaaaccatggggtatgaagcaggccaatacgacgtgattgtcatcggcgccgggcatgccggtgttgaggctgccctcgcatccgcgcgccagggagccaaaacgcttgttttgacgatcaatcttgatatggttgcgtttatgccatgtaatccgtctgtcggcggccccgcgaaagggattgtcgtccgcgaaattgacgcgctcggcggagaaatggctagaaatatagataaaactcatattcaaatgagaatgctgaatacaggaaaaggtccggccgtacgggcgctgcgtgcgcaggcggataaattccaatatcagcacgaaatgaagcatacgctggaaaaaacaccgaatttgacacttcttcaagggattgccgagcgtttaatcattgaagacggggagtgccgcggtgtcattacgcaaaccggtgctgaatataaggcaaaaacggtcgtgctgacaaccggaacgtatttaagagggcggatcattctcggtgatctgtcttactcaagcggtccgaataaccagcagccgtctattaaactttctgagcacttagaggagctcggttttgatctcgtccgttttaaaacgggcacgcctcctcgtgtctcaagcgattccattgattacagcaaaacagaaatccagccgggggacccggttccgcgcgctttctcatatgaaacggttgaatacattaccgatcagctgccttgctggctgacttacacgagtcctgagactcatgagatcatcgacagcaacctgcatcgttcgccaatgtattccggtatgattaaaggaacgggaccgagatactgcccttcgattgaagataaagtcgttcggtttaatgataaaccgcgtcatcagattttccttgagccggaaggcagaaatacgcaggaagtatacgttcaaggtttatccacgagtcttcctgaggacgtgcagcagcggatgctggcgaccattccgggactggaaaaggtgcagatgatgagagccggatacgcgattgagtatgacgcgattgtaccgacgcagctctggcctacactggagacgaaaaaaatccctaacctgtacacggccggtcaaattaacggtacatcaggttatgaggaagcagccgggcaaggaattatggcagggatcaacgcaggccgcaaagcgcttggaaaagaagaagtgatcctcagccgttccgatgcttatatcggtgtattgattgatgatttggtaacgaaaggaaccaatgaaccgtaccgtctgctgacttcacgggcggaatacagactgctgctccgtcacgacaacgcggatcttcgtctgacggaaatcggccacgatatcggcttaatttctgatgagcgctatgaagcgtttgagaagaaaaaagcggcgatcgaggcggagaaaaaacgtctctggtctgttattatcaagccgtctcctgagaatcaggaatatatccgttcactcggcggaagcgagctgaaagacggagtgcgcggcacagatttaatgaaacgtccggaaatgaactatgaaacagtgacaaaacttgcgcctgcagattctccggttccgcaagatgtggcggaacaagtggaaattcaggtgaaatatgaaggatatatcgaaaaatccttgcagcaagtggaaaagctgaagaaaatggaaaacaaaaaaatccctgatcggattgattatgacgccattaaaggaattgctactgaagcccgtcaaaagctgaaagaagtgcgtcctttatcagttgctcaagcgtcccgtatttccggcgtcaatccggcagacatttcaatcctgctggtatacctggagcagggccgtattgccaaggtagctgaatagaaaggatgacggcatgaatatagaggaatttacatccagtttagcggagaaagggatttccctttctgaccgccagctggagcaattcgagttgtattaccggatgctcgtggaatggaacgaaaaaatgaatctgacatccatcactgagaaaaaggaagtttatctcaagcatttttatgattcgataacggcggcattttatattgattttgaaaaggttaccactctttgtgatgtcggcgccggcgccggttttccaagcctgcccatcaaaatctgcttcccgcatctgcatgtcaccatcgtcgattcactgaataagcggattacgtttttggaaactctctctgatgctttacaattagagcatacgacatttgtccatgacagagcggagacattcggacaacggaaagacgtacgggaaagcttcgatctcgtgacggcccgtgcggtggcgcgtctgtcggtcctgagtgagctttgtctgccgctggccaagaaaaacggcgtatttgcggcactaaaagcagcagcagctgatgaagagctgaaagcggggcaaaaggcgattaaagtattgggaggagagcttgaacaagttcattcctttacacttcctgttgaagaaagtgaacggaacatcatgatcattcgcaagacgaaaagcactccgaaaaaatatccgagaaaaccgggtactccaaataaatcgccaattgaagggtaatttagacagcctgatgtgacaattccatcatattttctgcaaaattgatgaagatacagcaggaaaaaccatgagaaaatagaattataaaaatggcagtttttaaaggtggtgtaggtacatgaagcattcattctctcgtttcttcgggtttggtgagaaggaagaggaaccggagatagctgagcatgatacaaacaaagaagagatactcgaaataccggtacatgctatcgttcccaaccgttttcagccacgcaccattttctcagatgaaaaaatcaaagagttagcaatgactatccatacacacggcatcattcagccgattgttgtcagacatacagaagatgaaggacaatatgagctcattgcgggtgaaaggcgctggagagcggtacagacgcttgaatgggagaagattcccgcaattattaaagatttttctgatacggaaacagcatctgtcgctttgattgaaaacctgcaaagggaagaattgtcctccattgaggaagctcatgcgtacgcaaggctgttagaacttcatgatttaacacaggaagccttggcgcagcgcttaggaaaaggccagtcaacgattgcgaacaagctccgattgttaaagctcccggaacccgtccaggatgcgattatggagaaaaaaattacggaacgtcatgcaagagcactgattccgctcaaacagccggagtttcaggtcacattgcttgcggaaatcattgagaaaagcttaaacgttaagcagacggaagacagagtggtgaaaatgcttgaacagaataagcagaaaccaaagccgagacgcaaagcgttcagcagggatacaagaattgcgatgaatacgattcgtcagtcactgtctatggtagaagacagcggcgtcaggctgaacactgaagaagaagaattcgaagagtacatccagcttaccattcggatacctaaataaaaactctcctgatcagcaggggagtttttattttaatcaaaaaactattttgagataatgatagatttattgtgcactatacattatttatgtaaaattttatctttttgtgtcgtgaattgtctttttacagtcaaaaaagtcactttatcggagaacttatattagaaagtgtctttttcgtttacatttttttcacttgctgataaacaaattatgaaaaaaataaaacgctttactctttttttgataagatagaaacaagacagtacatgttcatgtgaaggtaggtgacatcgtgggaaaaatcatagcaattacgaaccaaaaaggcggagtcgggaagacgacgacttctgttaatctgggggcttgcttggcttacataggtaaaagggttcttcttgttgatattgatccgcagggcaatgcaacgagcggattagggattgaaaaagccgatgtggatcattgtgtgtacgacattttagtagatgatgcagatgttacagatattattaaaccgacttcagtagagaacttagatgtcattccggccacgatccagcttgcgggagcggaaatcgaattggttccgacgatctcacgggaggtcaggctgaaaagagcattagaatcagtgaaacaaaattacgattacatgattattgattgtcctccgtctctcgggttattaacgattaatgcgcttaccgcttcagattcagtcgttatcccggttcagtgcgaatactacgctcttgaaggattgagtcaattattaaatacagttcggcttgtgcaaaaacatttaaataccgacttaatgatagaaggagtgcttctgacgatgcttgatgccagaacgaatctcggcattcaagtgatagaagaggtaaagaaatactttagagataaagtgtatcaaaccattattcctcgaaatgtccgtttaagtgaggcgccgagtcacggcaagccgatcatattatacgatccgcgttcgagaggtgcggaagtatatttagatttagcaaaggaagtggcagcgaatggctaaaggcgggctcggaaaagggattaacgcgttgtttaatcaggttgatttgtctgaagagacagtggaagagattaaaatcagtgatttgcgccccaatccttatcagccaagaaaacaatttgacgatgagtcattagctgaactgaaggaatccatcattcagcatggcattcttcagcccattatcgtgagaaaatcattgaagggctatgatattgtagccggcgaacgccgttatcgcgccgcaaaacttgccggtaaagagacagtgccggctatcgtgcgggatttatctgaatcgctgatgcgggaaatcgctcttttggaaaaccttcagcgtgaagacttatcaccgcttgaagaagctctggcatatgactcactgctgaagcatttggatttaacccaggaacagctcgctaaacggctcggaaaaagcaggcctcatattgccaaccatttaagactgctgacgctgccggaaagcatccagaacctcattgcagaaggtacgttatccatgggacacggcagaaccttgcttggtttgaaaaataaaaacaagcttgaaccgcttgtgaagaaagtggttgaagaacagctgaacgtccgtcagcttgagcagctgattcagcagttaaacaacaatgttccacgtgaaacaaagaaaaaagaacctgtccaagatgtggtgttaaaagagcgggaatcgtatttgcaaaattacttcggaacaacagtaaatattaagagacaaaagaaaaaagggaagattgagattgagtttttctcaaatgaagatcttgaacgtatcctagaactattgtctgaaagagaagcgtaaaaaccatctttttaaaaaaagatggttttttatatacgtcttgtcagcttatgaaatggactgagccgttcctgccggccttctgatttatctgtcagctgtaacccctctgctaaaacatttgccatgctcataacaagatgaagcctcgtattctgcaggacaaaatactccataaacccgctgacattgacgattccattgatatggacgtcaccgatttcaggaagatctttttgaacacctgctccgggcttcagcggcccatcgccgatttgaaatgaccctacgcttttgacgcggcctaaacaagcatcaaccgctataataaacggatttttatgtagatgttgaatatctttcagcttgtctttcatattgacggcgtgaacaggatctgacagcgtgccgtaaacgtgcaatctgcctaaattcattttttctaactttgttcctacgagcggacctaatgaatctccggtcgaccgatctgtgccgatacacacggtgactaacggtctgccggctgctttacgtaaagatgaagtaaggatcgcttgtatttgattcgcagcagaagaatccgtatgagatacatattgttttgcccgttcttgagaaaaaagcccgccttttcgattcataaggttcacttccttgtcatgtcatacgagtattacattgttgtttttggtgatgtatggttgtttacagtatatccagcgctgcctttttttatgcttatgtcatgatcagcatgccggttgtttgaaaagagcgggatagaaaaaagaacccagagcagttattctctaagttcatgaaagaaataagaccatttgatctacatcaacatattgctgatgatctaatttcagcgctcttttttctgtagagaagaggataaatcctaactgagcgtagagttttattgcgggttcatttgttgaggtaacagagagatggagctgttctgtgtccttcatcttttttgctcggctgatggcttccgtcattaacgcttttcccgcgcctgaccctcggtgtttgggggaaatatacatagaaccgataaccgcaatgtgtcttagtttaaacagcggatgcttggagatcttgaggattcctatcagtctgtctttttcaaaggcgccaagcacgatggcattgtcggcttcaagcctggctttaaatttttcggacggccattctttctcctcatcatagctgacggcaaatgcgtccgggtgatcttttaaagctttgagcctgatatcggtataaggctgggtatcatttgcggttaaacgcctgatgtacatggtttgagctccttgcataagtgaatttttctgaatagtcaatcgtcgatatcataccatatttgtcccatttgtatgaatgattgccgctgtcactcaatatagtagcaatatgcggagatgatcagaaattttatgaggtgatgagggtgtggagagccgggatgaagtggatgctgctcatattaagcagccagattggggctgggtatgcaagcgggcaggaaatatggcagtttttcggtgtcgaaagcggactggctattgtattgtttacagtcatgtttacgatttcggcttatattgtgttgaagatcagctatcgggttcaatcaacgcactttttacctgtgcttgagcatctgatggggccggctcttgctaaagtctatgatgtgcttattatgttttatttgttttcaatgacgatggttatgattgccggcggcggtgtgacgctgcaaatgtacaagctgccgttttggatcggtatttttcttctttgcattgtgaccgtcggtttattcttttgggatataaaaggaatattatctctgaatagtattttgataccgattcttgtagcggggctgttatatgcattggtcttttttcagacaacccatcattacacgtggacgatagatttgacccgccagtataattggccggcaagcattaccttcacgtctttaaacatcctttctgttgtcgctgttctttcttcaatcgggaaagatatgaagggactgggagaagcgaaaatcgcaagcgttgcaagcgggctgattttcggtatgatttcatttgtttacaatgaaacgcttgtacagctttcaggcagtcttacacaatatgagattcctcttttcgctgtccttgaaggcgctccttatccgttatttctttgtatggccgccgtgctttttttagccatctatacgacaaccgtgaccggtctgttcgggctgtccagccgcatgcttgcatttgtgaaattgccgagatggacgctcgtatctcttcttttagctgtgatggtgccttttacgacaatcggtttttcagatttgatcgccattttatatcccatttacgggcttttaagtctttatttgctggtatgtcttcttctttaccctattttagggagatggaaaaaagtataatgctcattttgagtgcggccgttgctcttatcctgtttttttttgtacaataaataaagcagtctatggagagaggtgaagggtcttggcggataaagactttggcctgaatgatattgttgaaatgaagaaaccgcatccttgcggtgaaaacaggtggaaaatcattcggatgggaatggatattcggattaaatgcacgggttgttcccacagtgtcatgattccgagaagagattttgagagaaagctgaaaaaagtactcgtcaagcatgaggagcctacatcataagggctggcgctcatgctttttcatatagaggagaggaagaggcccgatgagcaaagtgcatcagtcagcgtgcccgctgaattgctgggacagctgcggctttttggtgacagttgaggatggaaaggtgacgaaagtagacggagacccgaatcatcccattacggaagggaaaatttgcggccgtggcagaatgctggaggcgaaaacgaatgcgccggaacggcttcgttttcctttaaaaaagatagacggcgaatttgtccgcatttcctgggagcaggcgttagatgaaattgctgaaaaaatggcggtgattaaggagacgttgggcactgccgcagtgctgcacagtcatgattacgccaataacggtcttttgaaggcgctcgaccagcgttttttcaatggatacggcggtgtgacggagattgcgggcagcatttgctggggttccggcattgaagcgcagcgctgggatttcgggcgttcttacgggcatggaccgcttgatatttatcacagcaagcatgtgatcgtatggggcagaaacgtgtcccggacgaatatgcacctctatcatcatctgcagcaggtgaagaaaaaaggagcgacactgacggtcattgatcctatttttaacccgactgccaagcttgccgatcggtatatatccgtcaaacccggcatggatggatggcttgcggcgggtgttttaaaaatattatgccaaaccggcagaaccgattccgatttcattcaaaggcattcggtcggttttgaagaaatagaaaagcttctgcagacgatttctattgaggagatcattgagaaaacagaaacgtctttagaagtgcttgaatatcttgctgatttatatgctgacggtcccgcctccacttttatgggtcttgggatgcagagatataaaaacgggggcgggacgatacggtggattgacgctttagctgcggcgagcggaaatgtcggtatcaaaggcggcggcgcaaacttcggaaatgtgcaagtcggtgaaagctttgcaaaggccgagctcacccggcctgatctgaagaaaagttcgagaacgttttcgatgatgactcaagccgaagaggcgctgaatgcagccgatccgccgattgagatgatcatcgtgacgtgcggcaatccgctgacacaggtgccgaatacaaaaaaagtgaaggaagcatttgaaaaaacaccggtcacagtggccattgattcggtcatgaccgatacggcgaagctctgtgactatgtgctgccgacggccgttgttttcgaagaggaagatatttattattccagcatgtatcatcactatgttcaatatggcaagaagcttgcggaaccgcagggagaggcaaaatcagaccgctggatctggacggaactcgcaaagcgtctcggattcggggagctctttgattacagtacggaagatttcttaaaaatggggctctcttctttggagaaagaaggaatcacccttgagcaattaaaggaaaaaggacatatgccgcttccggtcaaacaggttccgtggagtgattttcaatttttaaccccgagcggaaaatttgaattcgtctcgtcactggcagaagagaaaggatacagcggcctccctcaattggaggtgccggaggagtctgtttatcatgacgccggactggccgggaaatatccgtatatgctgctgtccattcacccgcagcgctccaatcattcacagcacgtgccgtttattgaaaagcttcagcagattcaggtggacctgtcgccggatatcgccgaggagctttcacttcaagacggagatacggcagaggtatacaatgaccgcggccgtctgcgcggcagggtgaaaatcatgaagcaggctcacccgaagacggtgaatatagatgaaggcatgtgggcggcattcggaggctccgtcaacatgctcacaaaggattcaaattccgataatggaatgggaagtacgctttttgactgtctggtagcggttaaaaaaggataatctaaggagagagagggcgggaaatgcttttttctcagcttgtcttttcctatgaacctccttataattgctctaggtttacaatacgtttatacgatgatggtttgatatagaggagatgaaagaatggctttaactgctggaattgtcggtttgccgaatgtcggaaaatcgacgttatttaatgcaattacccaggctggtgccgaatcagccaactacccgttctgtacaattgatccgaacgtgggaatcgtggaagtgccggatgaacgtctgcaaaagctgactgaattggtgaacccgaaaaaaacggtgccgactgcgtttgaattcactgatatcgcggggatcgtaaaaggcgcatcaaaaggtgaaggactcggaaataagtttctttctcatatccgtcaggttgatgcgatctgccacgttgtacgcgcattcgctgatgacaatattacgcacgtgtcagggaaagtcgatccgattgacgatattgaaacgatcaatcttgaattgattcttgccgacatggagacagtcgaaaaacgtatcacgcgtgtaagcaagcttgcaaagcaaaaagacaaagaagcggtttttgaatttgacattctgtctaaattaaaagaagctttcgaacaagaaaagcctgcccgttccgttgaatttacggaagaacagcaaaagcttgtgaagcagcttcatttgcttacgtcaaaacccgtgctttatgtagcaaatgtaagcgaggatgaagtggctgatccttcagataatgaatatgttgcgaaaatccgggagtacgccgcgggtgaaaacgccgaagttatcgtcgtctgcgcgaaaattgagtctgaaattgctgaattggaaggcgaagaaaaacaaatgttccttgaggagctcggcatcgaagaatcaggtcttgatcagctgattaaagcgtcatactctcttctcggccttgcgacatactttacggcgggcgaacaggaagtgcgcgcatggacattcagaaaaggcatgaaagctcctgagtgtgcgggtatcatccacactgactttgaacgcggctttatccgcgctgaaacggttgcttatgaagaccttttggcaggcggcggaatgtccggagcgaaagaagccggaaaagtgcgtctggaaggtaaggaatatgtagtccaagacggagatgtcattcatttccgatttaatgtataggacacagttgtaaagggacaagagctttggtataatataaacttgtgagtaatagaattattgctccttgcccattatagggccgcttagaccaaaaggaggtgcaaacagatgaaaaagtacgaagttatgtacattatccgtccgaacattgacgaagagtcaaagaaggcagttatcgagcgtttcaacaacgtattgacttctaacggagcggagatcactggaacaaaagattggggtaaacgtcgtcttgcttacgaaatcaacgatttccgtgacggtttctaccaaatcttaaacgttcagtctgaagctgcagcggttgctgaattcgaccgtttagctaagatcagtgacgatatcattcgccacatcgttgttaaagaagaagaataagcaatttgaaatatataatgttaaaaggtggtctttcatatgcttaaccgagttgtattagtcggaagactgacaaaagacccagagcttcgttatacgccaagcggtgcggctgtcgccacgttcactcttgctgtgaatcgtacattcacgaaccagtccggagaacgtgaagccgatttcattaattgtgtcacttggagaagacaagccgaaaacgttgcaaactttcttaaaaaaggaagccttgccggcgtagacggccgactccagacaagaaattatgaaaaccagcagggacagcgtgtcttcgtgacagaagtccaagctgaaagtgttcaatttcttgagcctaaaaacagcggcggttctggatcaggcggatacaacgaaggaaacagcggcggaggccaatactttggcggaggccaaaatgataatccgttcggcggaaatcagaacaaccagagacgaaatcaagggaacagctttaatgatgatccatttgccaacgacggcaagccgattgacatctcggatgatgatcttccgttctaatagattatcgctatattcataacgagaaaggtgggaaatgacaatggcaggaggacgcagaggcggtcgtgcgaaacgccgtaaggtttgttacttcacttctaacggcattacgcacatcgattacaaagatgtagatcttcttagaaagtttgtttctgagcgtggtaaaattttacctcgccgtgtaactggaacaaacgcgaaataccaacgtaaattgactatcgcgatcaaacgcgcacgtcaaatggctttacttccatacgtaactggcgagtaagccgaaagaaaagagcaagagcctgcgggctcctgctctttttttatatcagtccccctccatcctgccgaaatgtttcacatgaaacatggaagtgcttcttacacctttgttatcttgctcctctattcaaaaacgcgtacttatgcaatgaatttgtttatactgaaaaacagggggtggctgagatggagacagacagaaatatcctgactgatgaaaagtggagcgcaatcatacataatgatgcttcttatgacggggcattttattatgcagtaaaaacgacaggaattttctgccggccttcttgtaaatcgagagttccgaataaagaaaacgtgctggtgtttgatacggctgatgcagcgctcgagaaacattttcgtccctgtaaaaggtgccggccgaacggtcttcgtcttcctgatgaagaatggattgctcaaatcattgaatacattgaacgccattatcacgaatccctgactctgagtgtactggccgaaatgtgtcacggcagcccctatcatttacagcggacatttaaaaaaatcaggggaatatccccgattgcgtatatacagaaaataagattgtcgaaggcggaacaccttttaaagcatactgatatgacagtcatggagatcgctctgactgtcggaattccaaacacagcgcatttcgcgaccctttttaaaaagggaaccgggagttcgcccacagaatacagaaaaacggccaaaatgggacagggaggttcaatatgagtaaagagcctatgatctattggacactcttcacacggaatgattggagcctgtatacagccgccacatctaaggggctttgctttatagggtcaaatcatggaagctttgaagagcttgagcagtgggcaaaaaaatcactgccgcaataccgattggcacgtgatgatgaaaagctggcgccttacacggcagagttgtccgagtacattgaaaatggcagatcagctttttcagtgccggtggatctttacggaacagaatttcagcttgctgtatggaaagcgcttatggacataccgtacggcgagatatactcctattcggatatagcaaaaatgattcagaaaccggcagccgtaagagccgtgggcgctgcgattggaaaaaatccggtattgattacggttccgtgccatcgcgtcatcggaaaaaacgggaaactgaccggattcagaggcggtttagaaatgaaaaagcagctgctggcattagagggcggaaacattgaaacactggaataccggctgagccggacaggagggatcacatgaaactgatgtcttggaatgtaaacggcttgcgtgccgtgatgaaaaagatagatatcaatacttacgttcaggaaacggaagccgatattctatgtctgcaagaaacaaaagtacaggacggacaagtatcattacagcctgaaggatatcacgcctattggaactatgcggtgaaaaaaggctactcaggcacggctgttttttcgaaagaaaagccgctgcacgtgctctatggactggggattgacgaccatgatcaagaaggacgggtgatcacgcttgaatttgagcatgtgtttgtcgtcaactgttatacgccgaatgccaaacgcggattagagcgaattgattaccgtcttcaatgggaagccgattttaaggattatctgcagaagcttgaccggaagaagcccgtgatcttatgcggcgatctgaatgtcgcacacagggagatagacttaaaaaatccgaaagccaaccggaagaacgccggtttctcggagcaggagcgggaagcgttcagcgccctgctgaacgcgggatttaccgactcattccgctatttatatcctgatcgggaaggcgcctattcctggtggtcttacaggacgaacgcacgtgagaaaaacatcggctggcggcttgattacgtcattgtttcagacagactgaagcagcggatcagccaagcggccatttgtgccgatatcatgggttctgaccattgccctgttgaaatgacagtggatttatgatgagatagcagtaagagaaatccactcttgctgcttttttatcactgaaaatggaggagcacatggcaaatataaaagagattgcgaaactggcgaatgtgtcggtggccaccgtatcacgcgtattaaaccgacacccgtacgtatctgaggagaaaaggcgtcttgtgaatcaagtgatgaaggagctggattatacccctaatcgaaccgccattgatctgattcgcggaaagaccaatacaatcggcgtgattttgccgtacagtgaccatccctgctttgacaaaattgtaaacggtatcacgaaggaagcgtttgcccatgattacgtgacaacccttctccccaccaactatgaccccgctatagagatgacatatttcgaactgctgaaaatgaaaaagattgacggactgattgtcacgtcccgcgcgaatgaatgggagaccgccgtgccttacctggaatacggtcccattgtcgcttgtgaatatacacagcatcaagagattccctgcgcttataatgacaggcaggcagcatacagagaaagctttttgtatttgaaaaaccgcgggcatcaagacgttgcttttacatgtgtgcgggaagcggaaaaaagcccgagtacggccgacaaggtaaccgcatataaggcggtcttcggctctcttgatgaaactcgcattctggtcggatgccatgatatggacgacggaaagcgagcgggtgagcacttctggggtctcgacaaggcgccgacggccatctatgcgcacagtgatgacgtggctgccggcttgtaccagtttgcgaaagaacagaaatgggacgcggagatcatcggcgagggaaatctgagcgtcagccgggcattgaatattccatccctggaacttcatttggaacgggtcggaaaggaagcatttttattattttttcacgaagaaacggctaaaaaacaaattatgcatcaatttcagcggaaaaaagtcttgagctgaaatgggtttcatgctttataaatagattgagaaaaaaagggaggcggacatatgcgaattgaacatgcagcgatatgggtgaaagatttggaacggatgaaagagttttatgagacatacttcggcgccaagaccaatgacctttatcataatgagaaaaaagatttcaaatcgtattttctttcatttgactccggatgcaggctggaacttatgaaaaaaggcggcattgatgaagctccggcacagaatatgaccggatgggcgcatctcgcattttctacaggcagcaaggagcgggtgaatgaattgacggaaacgtttaaaaacgatggatttcaggttgtaagcggcccgcgcgtgacgggtgacggatattatgagagcgtgatagaggatggggaaggcaatttgatagaaatcacagtgtaacagtgcggagtgattccgcactgtttttttgattaaatttgctgtgcatttgttttcgggccgaagaggattaacaaaacggaacatagaagccagcagccgccgatgaacaaaaagacgctgatgtagccgagcttaacggcaataaatccgacgagcagggagccgaatatgttggaaaaacggccgagcccgtatgccagcccgctcccggccgagcgatattccgtaggatacggctccgatgtgtaggcgtataagtttgaggtgaagatccgttccgtgacgttgacgacaaacccaaacacaataatcatgacgggaataaacgtcatgccgtataacagtccggcaatggcagtcagaaaggcgcttgcggccagaatccatttcctttggaacgtctcggatatcatggaaccgagcaatgcgccaagcggtgcgccgacagagtgaagcacattgtaccacagcgttttttccacggtgatcccgttgcttttcagcaggctgggcacccatgaagcaaagccgtaaaagccaaaggtttcaagaatccataccgctgacaggatgatggtgatctttaaattcctgccctgaaacagccctaagtagcctgcgtgcttcactgtatgtacttctgccgcctcttttggcgcgggaagcgggcctttttctttctctgcacgtgcttcaagacggttcataatggcgtttgcctgatcatatgcgccccgattttcgtgccagcgcggcgattcctcaagccggcggataaaaaagaaataaatgagaccggccgccccccatacgaatacgagccgccacccccatgagcctaaaggaatgacaaaagcggaaacaacgtttgtgacgggaaccccgattagaccgatcatggcgcaaagggagatgtattttccccgtacggaggatggaaaaaattccgccaaatagctgttcgtcacaatcatggcggccgcgacgccgagaccggtcaagaagcggaaaatcattaaggacggaatgtcccatgccagcgcattcagaaaagatgagatcgaaaagacaaggacaaaacaattcagcgcttttttcctgccgatccgatcggacagccttccgccgatggacgcgcctaaaaacatgcccaggaatgatgcggccgtgatgtcggcaatggtggacagcttcacgccccaatgctcaatcagcgccggagccacgttgctgagcgtaaacagatcagcgagatcaaaaaaatagatgattccgagagcggttaatacttgataatgcacacgtgaaatggggagacggtctaatcggttcgctacatttgagaatgtctgatgtttcataaaaaaccccctgactttgcaattgtaatcagaaaatactgtgaatttatctgacgaatacattataaaggtctttttttggcaaaaacagagtgtaaataaccagagccaaaggaaacggcatagcgctttcttcttaaaatatataacatttcctatatctgtttctgtttatattgtaaaatgttgaaggaaaggaagttgatgcataaatatgaatacgtttgtacgcccagcagagggaagaaatagtgtatcgagatatattctttctctgttggtcattgtgggtttgttctttttcggaagcatactgaccgtgttttatatgtttctcacgtccgctttcaatccttcactgacgataaattgggatgagggggcattaagtgacccgctggcggatatttatttacagcatatcgtctatttcatagcgattccgggcatttggatagcggttcgtttcattatgaaacggcggtttttatccatcatcacaccgaatcagtcgctgaactggaagaggattttctttggattcggcacatatgttgtgctgatgtttgtcgcggggctgattgattttacaattcatccggatcgtttcatgcttcaggaattccatgcttcacgttttctgctgctgttagcggcggccgtcttgttggtgccgattcaaacctctgcggaggaatttctctttcgcggttttctgcttcagttcgccggaaaattgacggcaaacgcggtggttctgacagtcattatcggcggattattcggcgcacttcatttcgggaatccggagatggaaaatggagctctctgggcgggaatcggatatgtcaccatcggcatgatctggacctttatcacgattaaaacgggcagtctggagatgtcccttggcggtcacgctgccaataatatgtttttatttatctttctcacagaggatcattcggtgtacggcggcattccgtcgatatttacaacagcagccggcggctatgaaatatatgattgcatatcgactctggtgatcaatatcatcttcgcatggctcgcattccgttttgtgaaaaaagaaaagcagcaggccgcctaggctctgctgctgatttgtaaggtgttcatcgcttcatcaatatccgtcgtcggcctccggcaggcgaaattctcacaaatgtagaccgttgtcttcccgtcgatcatttgataacccgcggcaaagtcagaaatgccggcaagctcttccggatgttctgcggcgagaatcgtataggcgggagtgaaatgctcctgaagcgcctcaatgaaacgttttctgtccgggtcatctttccttccgaaaacaacgatttctttttggggcattgtatgtgccagtacgctttgcatgaagaaagcgttgctgctcggataggcctctatttcccgtttgaacacagaaaacatcgcttcggctttttcaatcagtgatatatcacccgtcaggcggccgagacgaagcagctgtacggcagccgcgctgtttccggaaggcacggccccgtcataaacctctttttccctgacaagaagggtctcagcatcattccccgtaaagaagaaacctccgtgccgttcatcccagaacagctccagcatgcttgtacataacgttttcgctttctgcagataagacggattaaaacccgcttcatacagttcaagataagcccagatgagaaaagcataatcatcgataaaccctttgtttttcacttcgccctcgcgatagcggaccatgacgcgcccgtccggcatgaggtgccgttcgagaaagcggatcgctgtttccgccatgctgagaaagtcaggctcgtgaaatacctttgcggcttttgccagcccggcaatcatgagcgcgttccatgaggtcagcactttgtcatctgtatgcggatagcttctgttttcacgggcctccagcaattttgttcttgcctcttcaaggcgttcggccagctcatgtccggtgaggccggtctcttcgaggatggcctcacgccgcgtgaaaatgaggtgcgggatgttttcgccttcaaaattgccttgatctgtgatgttatacaccttgcagtaaagcgggccgagttcatcaccgagaaggttcataatttcttttttggaccatatgtaatatttcccctcacggccttcggtatcagcgtctaaagctgagaaaaagctgccgtcttcatgcatcatttcccgctgaataaacgttacgatctgcagcgcaatctgtttgtagcgctcattacctgtgacttggcaggcttctgtatatgcggtcaggagaagggcgttgtcatacagcattttctcaaaatgcggcacgagccattcattatcagtcgagtagcgggcaaagccgaacccgatgtggtcaaaaatcccgccgttcgccatgccgtcgagtgtcttggttacgccggccaaagcctgttccttgcccgtatagctgtagtagcgaagcagaaacatgagcatatgcggcatcggaaatttcggagcctggccgaacccgccgtacactgtatcaaacccgccggccagctggcgatacgtgtcatgaacagcctgttcgccaagcatgccctcggccgggtgaaccttgacttcaagatgagcggcggcgttttcggcgatatcctcgacatgctgccggtcattcgcaaacgtttcggacagatgttcaagcacatcgataaagcccggacggttaaatttgctcgtcttcggaaaatatgtccccgcataaaacggcttctgatctggggtgacgaacacgttcagcggccacccgccctgccccgtcatcagctggcagattctcatatacacggaatccacatcaggccgctcctcacgatcaaccttgatggctatgaatttatcgtttaacataccggcgatctcttcgtcctcaaaggattcgtgggccattacgtgacaccagtgacacgtcgaatagccgatgctgacaagaaccggcttgttttcgcgttttgctttttcgaaggcttcttttccccaaggatgccagtttacggggttgtgggcgtgttggagcagatagggggacttctccgtgattaaactgttgggtttactattgtttggcatgggctcacctgctttctattaatatttgtatgtttaacataccacaatcctctaaaaaaattcatacactcaactttgtgaaccacacccaagtcattaaaaaggagaactgcttatgactctattttcagggttaaacttcatctaccttattgctttttagataagaaataaggatttaaaatctttatcgttttatttactgttagataggtgaaacacaccccggcgactgtaaccatcccgcctgtcagtgcaataaacacaggtacttcacctaaccacacccaagaaatgaccaaggctatagcgggtgttaaataaagtgaaatggttgcttctgaagcaccgacgagtgaagttacatacgcaagtgcaaagtaaggcacaaccgttggtaataaacctaagtaaacgatagacaatgttgagttcattgaagcgttcaaaaactcttcccctaagccaggcaaaaacacaagcataggtattgtcccgccccaaatagtgaatgtaacgaatggaataaatccatatttttttatatagcgagcttgaaaaacgaaataaatactctccgaaaaagctgccagcaggattaacaaaatgccgttcactgaatttgtatagtttcctgccccaaatgaaatgatcgacacacccaataaacttatgatagagccaatccatttataaagcccaaaatgttcaccaaaaaacagacgagataacattgcagaaaaaataggtgtcatggtcacgagtaagcttgctgtccctgcgctaactgttttttctccgatattcagcaaaatgtgatatagtgcaaaacctaaaaatcctaacgataaaatagcagggatatccttcatgtcaggtaaacgcatatgagtcaaaacagcaaaaaccaacagtgccattgacccaatcaacaagcgaaacaaagcgaggtgttccggcgtgtaactctccaaacccgcgcgaattcccgggaaagctgatgcccacaacccaatcatcagactgtaagatatgccgattcgaactgttttcttttgcatctttctcactcctctttacaaaaaccaaccagttatttaatgtgtttctatattaataaagatttgatgatatgacttcaaccagttaaatagattttgacccaaccacttttaaggaggatcctttttatgagcgctccagaagaaaaaaagatgaaaaagcttcctaagtacatacaaatcattcaatttataaaagagaaaataggaaatggagaatggccgattggaagtaagattccaagccagcgcacgcttgctaaacactttgaggtgaacaggagcacagtcattacagctttagaggaattgacggcggatggattaatcgaaggcagaatgggcaaagggacagttgttacgaacaatacatggacacttttggctaagaattccgctcccgattgggatcagtatgtaacctccggaatccagcagccaagccaaaaaatcgttcaagagatcaataaatcagaatcgaattctgatcttatacagctcagtaaaggagaactttcacatgagatttttcctttagctgttatgaaagagatcatgggaaaggtatctcaaaacatagaggcattcgggtatgaggaaccaaaaggctatttgcctttgagagaggcattaagcggctatttaagaacaatcggcattcaagcgtctccttcttccattcttattgtttcgggcgcactgcaagccttgcagcttatatcaatggggcttttacaaaggggatcgaccgtatttctcgatcagccttcctatctttattcattacacgtatttcaatcagccggtatgaagctgactggagttcctatggataataatggacttttgccggaacacatccacatggcaaggggggaacgggggagggctatcttatatacaaatccttgttttcataatccgacaggtattttaatgtcaaaaaagagacgagaagaaatccttgcggcaagtgagaatgcacagcttcccattattgaagatgacatttatcgtgagttatggatagatgagattcctccagatcctattaaaacaatagataaaaatgggcatgtgctttacataggcagtttatcgaaaacgttaagtccgggcttgaggattggatggatcgtcggtccagaaccagtgattgaacgtttatccgacataaaaatgcaaacagattacggctccagttcgttatctcagagagtagcggcagagtggtttacatccggtgaataccagcaacatctagaacaggtgagaagtcaattaaaggtgagaaggcaattggtcatgagtctcttagaaaccaatttgaagaatgtcgctgcatggaatatgccgaagggaggattctttgtctgggtaaaaatattgcctttactatctatgaaattactttatacaaaagctttgacaaaagggatacttctcaatctcggcagtatctatgctcaagaaaaagggaattatattcgcttatcatatgcttatgcatctcttgaagaccttcaaaagggaatttatgaattgggtttgatgattaaggaattggcaagcagataaatataatgattactaaaagacagggacatgctatcaatgacaagaatctgcttgttttcgcgtttcgcttaattcaaatgcttcttttcccctcatgaaaaccagtaaaaaagccgccaacaaagcggcttttcttaagttaagatgccgaatgtcaaaaaaatgttaatttctgctctccttgtttttattcaaacttcaatctgtatggctatgtctctcctagaagaacagcggcttggttcttgaagagtaaatcatttacagaaattcttatatctacagatgaagaatagcgctttttctattatttagatcattgggccgtataaccgccgtccattacgactgcctgccctgtaacccctttcgctttgtcactggcgaggaatactgcgtaatcagcgatttcttgcacggctaacaaacgtttttgaggaaccaaggggtaaatgacttcttcaaacaccttttctttagaaatgcctctagtctctgcaatatcttttaactggttttgcaccaatggagtgtcgatatatcccggacacaaggcgttgacggtaattccgtattccgctccttccaatgctgatactttagttaaaccgatcaaaccgtgtttagcgctgcaataagctgctttccctgcaaaaccaattaaaccatttatggaagccatattgatgatgcggccaaatttttgttttttcatcaaagggaatactctttttgtcgcactaaaaggagcagtaagcattaatttcagcataaattcaaacttatcagtcgggaagttttctatatccgacacatgctgaatccccgcattgtttaccagaatatccaatcgtccaaaggtttcaagtgtcttagagacacttttttctacttgttcttcgtttgttacatcacaaaccgcagagaggacttcgtatccttgttccgtaagttcctcagctgcatgttgcacggctttttcgttcaaatcggaaatcacaacttttgcgccttctttagcgaattcacgtgcaatttctaaaccaattccactcgccgcgcctgtaacaagagcaactttactttccaataatttactcatagtaacccctccaggattcattttggtctcctaaaagtttacacccagcagttgtataagtaaaatgaataaaaagaatataatgtattcgttaaacttatggaatggagatcatacgatggatatacgccaaatcacttactttcttgaagttgctaaatccaacagttttactaaggcatcagaaaatctgcatttgtcacagcctgccttaagtaagatggtgaaaagtttggaagaggaattaaaggttgagctcattgatcgatcagctagacaaatcgctttgacagatgcaggcgaaattgtatttgagcaaggccaaatgattatgaagtcaatagatgacttgtcgacgaacttatacgatctcttacatttaaaaaaaggaaaagtgaaaattggaataccgccgcttatcggtgtcttgttttttcctaaaatcattagaggatttaaacaattgtatcctgatgtgagcatcaagctgatagaacatgggggaaacaaggtgaaacaggaggttgaagatggggtactggatcttggcgtggttattgaaccagtggacgaagagcagtttgatatcattccattgcttaatgaagaactgatgctcttcgttcattccgctcacccgcttgttcataaagagattgtggaaatgcaagacttgaaaaatgaacctttcatcctgtttagtgaagacttttctctccacgatcggattattcaagagtgcattagagctggtttccggccgaatgttgtttatgaaagttctcaatgggattttatcagcgaaatgattggagaagaactagggatttccattttccctcagtctatagtgaaaaagactgatcaaagtttagttaaagcaatttccattgtcaatccatcaattccttggaaagtggcgattattttaaaaaaaggcaaatatgtttcatacgcagtacgcgaatttatccggtatatttcaactttttgtaagagtaattacgcagataaagaataactcatgaaaaaaatgaatgatttttatagtttttatgtattttacggttagagagggctgcgatatattatcttatatcagaaaatcagtacctttcaggaggaaattcaaatggatcaaaaccgttaccaacaaggattagacaaattaatggagtacactttaacaagcgatgataaaatctctacgcatttaaagatttcagaagacttgaaagatatcgctccggatgtaagtaagtacattatagaatttgcttatggagatatatattcacgaccgggattaaccaaccaacagcgtgcccttgtcaccatctcatcccttgtcacgcagggaaccgaaccgcagcttgaacttcatatcaatacagggcttacatccggattaacaccgactgagattgtagagagtatcacccaattggttccttatacaggattcccgcgtgtacttaatgctctttcagtggctaagaaagtgtttgcacaacgacatgtagaaaaccattgagaaataaagagcttggggaatgcgggatgaattagtataaactcatcaatagaatatacacaaaacgacagcctataaggctgttttttaatagtctcgcttatcataaaaaaagtctgtgccaggcctatatatggtctcttttttattttcggttgatcatatgtaaaagcgattattttaatcgctttttgatacttcaaaacatgctaagctttgacctctttatcagtaagcacttttaaagcatctctcacttttaaggcgaagttgacaggtttatcaatcgattcgaaatgaatatacatcagtctcggtttatcaaacagccagtgattgtgaagtgacgttacagtcagatcatgtttccgaaggacgctgataaatggattgatttctttttgcagaatgacagtttctccgctgcaaagagcacggccgtcttttgtcattgattcaaatgaaaacatttgcggaatgagcaagaatgatcttccgggccgtccaagtactacaggttttatattcgttcgtgatctcattactgtacaaattccattttcaaacgtatgcatggttccgcctagaatatcgttgaactcgtcacaaagaccatgccgttcaatcatttccccgtcagtttttggtaccgcacgcacagttttagtagttagaaccctcagggcctctctcacttttcttgcaaaattgagaggtttatcaattgattcaaaatgcataaacatcaggcgcggtttatcaaacagccaatggttatgaacggcagttacgatgataccgaatttgcgcagctcactcattaacgggttcacttcttcttgcagtaaaacagtctcacctaaacataaagctctgccttcccgatccatgctttcaaatgaaaaggcctgaggaataaaaggaaatgcctcggctcttcttccgagtaccaccggatgaatgttgcttcgaaatcttgtcgccgtacatacgccgtttacgacactgggcgttgaattgagaattctagcaaattctttgcagagccgtgatggctccatactcgtttcttccacttcatatctcctcctggaatctatttataacgtacgtagtattaaagatatgtgaagatagaaaaaatgtaacgcgtcagcagtccatattagagagaatcagtctttcttgtataatttgagattttcttccctttttacaatctctttaactgttaatttttaatagattaaaagcttaaattggtagttttattccagctttgatttttttgtggcggtcatttgtgacaagcaccggctgagcacacataccttttagttgtgagtttcagaatatgaaaaaaagcctttatacaaggctttcggtaaataattcatacagccgtttggctgctcattcagtgacagctcacagctcttttgtcatcaagacatgcgggatgccgtcttccataaattccggtgaatctgtctgatagcccagtttgtgataaaagccttccgcatgtgtttgtccatgcagtttacattgggtgatgcctttttcttttaccatgttttctaattcgcttatgatgactttgcccaacccgtatttgcggtaaggcttcaggatgcagattcgttcgagcttgcctgtatggtttacaatgcggacgcgtcctgtgccggcaggctgattttcatgataaaccaagacatgcccgcactgatcctgaagcgtatcgaactgatcaaattcatcggattcaggtacttgctgttcctcaatgaatactgcttttctaatctcaagcgctgcttgcaaatcaatttccgttgttattctttttatcttcataatcaaccaatccttttcacatgttagtctggactgcacggcttgcttgtggtcttatagaagtaacgataaaataattatattgcaaatgcaacaaaaatatgaggggtttgaaaagatatgactgatattttgcgggaaatcggcatgatcgcacgggcactggattccatcagcaatattgaatttaaggaattagacttaacaaaagggcagtatctctatcttgtgcgtatatgtgaaaacccgggagtgatacaggaaaaagtggcggaaatgattaaagttgaccgaacaacagcggcgagagcaatcaaaaaattggaaatacaagggtttattgaaaagcgtcctgatgatcaaaataaaaaaataaaaaaactgtttccgactgaaaaagggagaaaggtttatccgttattgcaaagagaaggagagcattctgcggaggtagccctgtccggctttacatctgaggaaaaagaaaccattttcagccttcttcagcgggtgagaaaaaatatagaacatgattgggaatttgtgaagaaggggaataaaagagattattaatggtcattaattccttttagtgaatgattgcgttgtgaatgattaaagtcataaatggatacgttatctgtgacatctccttcctcggttcctgcttcaacatagccgataggcttatttttaacgaaaagtatcaattatggtatatttaaataagaaaaaataattgaagcggggaatgatatgagtacaatcgaaaaacaaagacgtaagaaattcagagcgaaatcaatcgtacgggccatcatggtcatcatcggcggaattattgccgcgtatggactggaaaccgtattgattccgaatagtgtatctgacggcggtgtgaccggactcagcattgtcggttcacagctgtttcatttgcctcttgggatcttaattgcggtgatcaatataccgtttgtctggttaggatataagcaaatcgggaaaggttttgcgtttctatcaattatcggtattgtctcacttgccgcgggcacgagttttttccaccacacaccggctatcattgagggagataccctgttaatcaccgttgtcggcgggattattctcggcttgggaatgggattggcattgcgcaacggcggcgccttagatggaattgatatgctggctgtgcttctgtcacggaaattgccgtttggcacgagcgacctcattttatttttaaacatgtttgtgtttatttttgtttcttttgtattcgggctgcaaggcgcattgctttccgtcattgcttactacattgcatctaaggtgatccatgtggttgaggaaggcttaagcggttctaaaacttttcagattatcaccaatgagcctgcattaatggtagagaccattcgtgaagaattgggccggagcgctacttataaagaagcatacggcggtttttctcatgaaaaattccaagaaatcacatgtgtcatcaaccgtttggaagaaaccaaactgaaagaaattattaatgacattgataaacaagcctttgtgacggtatatgatgtcgcagaagtaaaaggcagtaatttcagaaaagtccataatcattaagaagcgagctgccgttaatcggcagcttttttaaaaaaggagaaaaaacttgcaaaaatagaatgacggctgtatattattgatatatcaaacattgactagtcaattaattgcgcaaaagaaagtggggatgggttttgacagcatgttgttcagaggaaggcgagattttatatcagctccaatcactgcataaagtgatcggcacgaagtttgaagcgtgcaccggaatcagccaatcccgccttgagcttctcgccgtgcttttttacgtcgacgagatcagccaaagcgatcttcagaaaaaggtgaatattgatggtgcagccgtgacaagacacttgaaacagcttgaagccaaagaaatggtcacaagaaggcggaagcccgaggacaaccgaattatacttgtccggcttactgaacaggggcgggagagaatcgaggcttccaaaaaggagaaggagcgtttcataaaggaaatgcttgccggtgtcagcgcggaagaacgcagtatgttaaaaaacgtattgtcacagatgcagaataatatagaaaatatgaaagcataggagtgttttacacatgaaaacagaactgaaaacaaacgactttatggacattatgaaaggccgccgttccattcggaattacgatccggctgttaaaatcagcaaagaagaaatgactcaaatcctggaagaagcaacgacagcaccgtcttcagtcaacgcgcagccgtggcgttttctcgtcattgacagccctgaaggaaaagaaaaactcgcgccgcttgccagctttaaccaaacacaagtcagcacatcatctgcggtgatcgcggttttcgcagatatgaacagtgatgactatttagaagaaatttattcaaaagcggtcgaactgggctacatgccgcaggaagtaaaagacagacaaatcactgcgttgacggcgcattttgaaaaactgccggagcaagtgaaccgtgaaacgattctgattgacggaggactcgtttccatgcagctgatgcttacggcgcgcgcgcacggctatgacacaaacccgatcggcggctacgataaagaaaagattgccgaggttttcggaatggataaagagcgttatgtaccggtcatgctgctatcaatcggaaaagcggcagacgaaggatatgcttcctaccgtcttcctatcgaaacaatcgcacaatggaaataaggttgaagtgaagctgaggggagagggacagtggagattattgcagctgttttcgtcggagttgtagctttagaacatgtatttatcatgatacttgaaatgttttttatcaattcgaaggcagctaagcggtccttcaaattgccgaagcatttagaaggtgatcggaatgtagcggtcatgtttgcaaatcagggtctgtataatggatttctggctgccggcctcatttgggggctgatcctcggagctgatccgattggccatatgattcaattatttttcgttatttgtgtggtcatcgcggcctttttcggaggctttacttcaaacaaatcaattatcgtaaaacaaggacttccggctgttttagcgcttatttttcttttattggcgtagcagacggaaagagggcttccggaaaggaagccctctttttttattctgttttgaaaatcattccttaggcggatcttttttgaattacagataaatgcttaccgcagaatagatgagcagcagacacatcacgatgcgaaacgctttatcgtgtttctcaaagagatgtttaaaaacagagccgaacgccgaccacagcagtaaagccgcccagcccaggagaatagccgacgcgagccagaacgcaatcaatggatacgtgtgctgaaatggcaatataaaagcgctcattaaggttaaaaagaataaaatactctttatattgatcatttgaaacagaaatcccgatagaaaagacgatcgggttttttcagaatcgccttttgatgttttgggcagcgagatctgccaagccaaatagagcaaatagacggctccggcaattttaaagtaaggttccacgacgggaatccaatgataaacactcatggtaaacagaccgctgagaatgccgagcactgcaaatcccgtcaggatgccgccgttaaaacgccatgaaccgataaagccggctctgcgcgcttcattcatcattaaaatattgctcggcccgggcgtaatagatgtcatcaggacataagaaagaaaagctatgatactcattaaatcaccttcatttgctaatgtgatggaaccgttttttattgtatgataagaatagttataaataaaattgaaaaataaaatcgcattattgattttttcgatacatcttagaggtgaattcatatggagatcagacatcttattacatttcaggccattgtagataagggaagctatacaggggccgcggcgaagctgggatatacgcagtcgacgattacgactcatattcaggcgcttgaacaggagatcggcggcgcattatttacgtacgaaaaaaggcgtctgaaactgacgcctttagggagagagctgataccgttagccgaggatttactttccgcccatgacaagatcaaaaatatgcaaagcattcacgaggtgaagggcgttttaaaaattgcggcgccggagtctttgaccatttccagactggggccgattatcagagaatattccatgaagtatccgaacgtcaatatcatattgagcaacggaacatgcgggcagaatcaggtggaattagtaagtggccgcgtggatatcgcatttatggtgtatccggagatacaaatggaaaaatgcatacatcattctttattggaggaacgcatcgtcctcgtggcgggcagtgacgcaccggaacattttgacgactatcaacaaagcggcaagcacttttttattacaaatgaagaaggatgcagctatcggactatgtttgaacgatttctcgtcaagcatgatatcagtcatttacaaacaatggaattgtggagtatagaagcaattaagcagacggtgatgagcggactcggtttctccgttttaccttatattacggtaaaagaagaggtaaaagcggggaagctgaaaattcttcagcagtctgagccgttcgagcggctttattctcatatgctggtcaaaaagaaaaaatggcagcttccggccgctgaagcttttgtgtcgcttgttcttgagatgataggttaatttgaaagccgatgcctgcgcgcatcggcttttgtttttgtccggaatcttaatgacattttcgatgtcagccagctttgactccatacctaccttttttaaaaaaagagagctgatcagcaaatatggtatgatttacataatcagggagtgagaagatgaatatgaagagagcgtattatgctattttatacagccagaccgctatcaacttggggttctcactttatacgatggccgtcatcttgtttttgtttacaaaaaccggttcgacggcgatggcctctcttatgacgctcgtcagcattgtatgtcgcgtattgggcagcgccgttttgccgctggtcaccggccggttcacgcttcgttctttgttaatcagttctcaattgatacagatcacactgttagtctgtttgttttttgtcatccaaaccggttcatccgcattcttttttctgctgttttgtctgatcggaggcatttctttttgcaacggatggtttgctccgataaaaagcgcgctgattggggaaatcattcctcctgatcgaagggcgaaagcgaacggtttattatcggcggcggatcagaccgttcagtttgcggggtggtctctgggcggcgtcatcatagcgttcctgggagagagcgatacaatgatcgtcactgtcatgttattggtttcttcggtgttgggcatcattctgtttcttcaagtacgcatgtgtgcgccggcagcagtcagggaacgttccctttttgcagatgcggcaagcggctgggtgtatttatttcagcaaaaacagctcagggttctcattgtgatggatgtgatcgaatcgtgggcaggcatgatatggatcggttctgtgtccttgacttatgtgcatgacgtccttcataaaggagaggcttggtgggggtatgtcaacggagtctattatgcagggacgatgatcggcggactgatcatctataagttatccggtaagtttcagcatcatctcattccgcttatgctgacgggagccttggcatatggaatgttcacgtttatttatgggttgatcacaagcgccgttactgccctttttctggtgctgtgtatggggccggcttgtgtattacgagatctcacgcaggaaacattccttcaaaacatcacgaccgaaaagacacgggtcaatatattagcggcgagatcagctttagttcagttcatttttatgttttccattatcggaacgggggttatctcggatgtattcggcgtgcggtttatttatattggcgcaggcctcctcttattaatttcggcttttatcggattttctcagctgcgaatgaagaagatggtacaaagtcgcatgtagtgtagtataatgaggaacgtacgttctatatcgagagaggagagggtaatgtgggacatctggcactgcaattgtatgattatcatctttgggcaaatcagcaaatattcacccggcttaaagagcttccggaggatgtgtatcgtaaggagattcaaagtgtctttccgtcgatagccggtgtattgactcatgtgtatctgtcggataaggggtggtttgatgtgttctccggagagcgtctggaggatacgctgaaatcagctgaacagcaaaaagaggacatcttgtctaaagagatagaagagctggaagatatgttctcggaattatcagaccggtatcaattatttttgcaaaaggaagaaaatatcagtctccctcttgaaatagagcatccgtcaggtgacatcatgaaaaccgcagcggccgatatgatcctccatgttgtgaaccacggaacgtatcatcgcgggaatataacagccatgctcagacagatggggtatgcttctgtgccgacggattacggtatgtatttatatataaacaataagtaaacaagacagccaacgcggctgtcttgtgatatccgtaaaaaagccaaatcatatgagtgatttggctttttcatttgctatgccatgttctgcagccgttctaaactgtttttccaattcgcttcaagcgctgtaaaagcagcggcggcatcttgctgttctaatgcgtgaatgatatcagagtgttcattatatgatctgtttaaagcgccgttttcactgaaatagcggatttccagtctctgaattttgactttcaggcttactagcaatttgtgaagttcagcgttgtccgcaagtagaatgatgcgatggtgaaatgcattgtccgcttccaggatggccagtttatcgccgtctttcattgtttgaagaagattttcattcagctgtttcaattcctgaatcacggcatcgtccacatgcgggagagcttgctgcaatgcgagtttttcaagcgtccagacgatggaatacaagttttccgcttcttttaactcaatcggagcgacaagcgtccatctgttcgcttttgttatcaccaagccgtcatcttccagccgcaataaggcttcccgtatcggggtgcggctgattcccaatgtttccgacaaatccttgtcctttaactttgtttccggtttgagcttgcccgttatgatccagtttctgagtgtgcgatacacttcgtcccgcatgatggttcttttcagcacaggttctttgttttgattatccaatggaacacctcatgaatcgtagtatacatatttgcattttaccacagtccgggcgctggttagaaatgaagagggacgtctaagaatgaatcgaaccgagatgcttcatctcaatatgctgaaagtcagcggagccgccttcagaaaagagcgtgattccctgatcttcgtgttttgggaacacttcatttgtcaaaacggtttttccgtcgtctgcaaatacttcaatacttgttttatccacgagaattttcagatggacgcgccctttgtttccgtcaaatggggctttgctttcggcgtatgcgccggttttatcaggctggtctgtaaacgatctgttcacataggcatagccgtcttctgccgaaataccgacatcaatatgccgactttggtctgctgattctctgagtctgacgcctgcatttttgatatctgaccaagcgatatccatatcaagctgatatgtatcacctttgatcggcagtgtctctgaaccgttcacctgtttgtgttctatgctgtcagttgaagaggttaattggttcaatgcttcaaccggctctgacacaaggctgtatgtgccgccgtcctgctgctgaaggcggatttcacggacgatagaatccgtaccgttaaagccgttttttagtgtcggtgtttcattcggataatcccaattgttcatccatgccagcgcatagcgttttgtcagcggatcttcgctattaccgtcctcaaatgtgacgccgccgtaccagtcaaagccgtaatcgagccattgcggttcttcttgatcggcggaaaattccttcccgtcaaagtttccggtccaatacgcgtacgtattcggtttgcctgcgggtttgccgtttgcgcttgcgcccagaacccacttggctgttccgtcatctgcacgcatcatataaaggtcggggcattcgacgaggccgatctgctgagtgataaaaccgcccgtgtatgtccaattttttaaatcgggtgattcataaaaaccgattttttcgccttcggccatggccatcacccatttgtcatcctgttcatcccagatcactttcgggtcccggaaatccttagttcccggatttttcatcacgggctgatcactataggaagtaaacgtttttcctttgtccgtgctgtaccataaatattgttcctgggcttttgttttggctgtcggctgcgttgtgacggcgaccagcgcgtttttgccgaagcccgcggtgttgtgtttatcaatgacgacagaaccggaccatatatcgccgttttcgttggtgtatttcggaatagccgtgccttcgtccgtccagtgcaccaagtcctctgatacggcgtgccgccattctgtgccgttgccgttcgggtaatcccgattataaagatagtagtaatgatatttcccctcgaaaaaaatgggcttttgagggtcgtttttccatttgtccggggtcgtaaaatgatacgccgcacggtaatctttcttatgctccgtgtttgtgtcagaggaattgtggcttttgttcggcagtaagccgacaaacaggaacgcacccaaaaagatcaatattacaacgggccattttcgtgccatgattgagttcaccatcttgttgagaaataaaagaaaatgccaatgaagtatcggcattttctttttgttgttattagttgttaaccgtaagctgtccttgttcaaggatgctgtttttaacaacggatgttttcttgcctttgatgttcattaagaagcttggcgcaaatgttgcctttttatcctcaaagaagcctctgtttgtcatgtagcttgtgatcacgacattgttgcctttggcttgcggcactgcgaagtgagagtaagtgaacgttacatcgttaggatcaagacccatttgcagtacaagaccagttttgttcagcggcttgtaaggacctgttaaagagtttgatacataaccaagcatgtagatatcgttggagttaataccgtcgatcgtcatttttgaaccgcgtgaatcagtgaacagataccatttgccgttcattttgaaaacattcgcgcgctcgatttcatcagttaccgtgtttgaagtgatcagcggcttcatgacttttttcaatgtgtagtcattgtttaattctacgatgccgagggcgccgttcgctaattcagcatcgcgttttttagcactttgctgaagcttctgactttctttacggaagaagtttgtgctgccgccgtagtacgctttgttaaacaaagattcttcgccttggtatccgttatctgttcccgtgttggcttcgaatacaaggtatttatggcctttgtcttcaacgtagtgagggtctctcagcgtatggttgtcgccggatgtatagttcccttcatcgataaactgctgaacgttttgatatgtttttccgtcaccgtcaaaaatcgttttatgatcttccactccgttgatcttgagcgtgtcatcagattttgacacatttacctgcgccgttgtcaggctttgtttgccgtaatgtttaccggaaaagtcagtgtagaataaacggattttcccgtcagatgtaaaggttgcagaaccggaccattcttgtgtctgttctttcaggatttcatcgttggcgtcgaacttatcgctgtctttaaagacacggccagcgtttttccagctgtcgatcgagttgtcgccgactttttgataaaacatgtagatggatgtgtcatcagcgtctttcgggcttccggcaagagcaaacacgacgtgatagccgttgtattcagctactgttccgtcagcgttttggagcggccagctgtcccacacatccagtccttttgcggactcgatatttttaattgttgattggtcgaattgaggcacttggtatttttcactttgctgctgtttagggatctgcagcatatcatggcgtgtgatgtgagagacgccgtacgtttctttgtaaggtttttgggtattttctttcgcgaaggcttgagtcgctccccctgccagaagtgcagtcgtaaaagttagaactgtggctcgttttgcaaattttttgatgttcatgttcatgtctccttttgtatgtacctttttttgcgatctaccgattcgctcctcctgcattcatggatggcaggtttgttacagaaaaaaagacctaaaatatgtatggggtgacgccaaagaattcactttgcccttaacacattttaggtcttgcctgctttatcagtaacaatcctgcatgatttacttgtcgacatcattctattagactctgattctattgacaactggtctattttcctcttttggatgatagtaaaatgaaaaaaggccttttaatatatgggtaattgagactaaggggtgctctgggcctaggaaaaaacctctctgaaaaagagaggttattttttcttgatagataataaagcgatggtagctaaaatcagcaaagtacccagccattctgatattccgaagggaacatgcagccagatcacagctaaaaaagctgccgacagcggctctgcacaagcgagcaggctggtttcagaggcactcagatatttcaggctttccaagtagcaataaaaagcgatgagcgttccgaaaatgatgataaacacgatcgcggcatatgcaggaaaggaccactcgccttcaaatttccagggcgggcggatcaagctgagggcggctccgccgatcagcatgccccatccgacaataatggcagatccccatttcttcagcagacgatgcggctgaagggtgtaaaacgccagtgcaaacgccgaactgatgccccaaaagacggccagaccggatacggacaggcttccgacattcccgtgcgtgaccaaaatgaatgtgccggcaaccgccaataagacggcgagcagctcttttcctgaaggaattctctttgcgcgaatcgctaaaaagcatgtaatgatcgctggccctaaatactgaagaacggtagcagttgccgcgttgccgtactcaattgccgcgaagtaggtgtattgaacgcctaacattccgaaaatcccgaataaaagaaggggaattctgtcccgtctgtctttccaaacagcccatatccgtcctttttctttgcggtacgcgatgccgagcagaagcgcccctgacaccagaaggcgcaccgaagtcagccattctgtattaaaatggcggtgctggaacagatactgggcaaccgttcccgagaccccccataagatagctcctgtaagcacaagccaaatgcctgttgttcgtgaataagaaagagcagcgtgtttttccaggatagacacccccgattctgatgttctgatattaacttacaataattaggaaaacgaactccttacatgtgatatattatatattgtatattaaattccgtcaaaaagattttcggagaaagctcttacaaaacggccgtctgaggaatgagctgtaaaaaaaaacaccccggcgggttgggactgacccccgtttttgagacagggatcaaaacacctttaagcagccagctgtcggtatgtgaccggcggctggttgtttagtttcgtttgaatacgaatgttgttataatagtgtatataggtttcgacagtttgttctacgatggtcgtcgtagtgctttccaacctgtcgaggtagaacgtttcagactttagtgaggaatgaaacgattcaatggaggcattatcagcgggcgtccctttgcgggacatgctcatggtaatgccttttgttttaacagctttctgatactcataagatgtataaacagaaccttggtcactatgtaacacacagttctctggcagtgcgggcagctgatcaagtgtgtgtaagacaaagtctgtgtcctgtctatcgccaatcgtaaaagcaatcacttctccattgtataaatccaatatactggaaagatacaattgtttctgcccataaggcaaatatgtgatatccgttactagcttttccagagggcgatcagactgaaagttccgatccaatatattctcggccacggcatatggctgcccattcttcttgcgctttttcaccttaacccggcattgccactgattcttctgcataatgcgctgaaccgttttatgattcatacgcattcccttttttaatatggctgtgattttccgatagccatatcgatacttgtgttctcggcacaacgtgccgatttgtttttctaaatggtatttagggttatctttcatcagattcttcttccaacgataataagatgctcgtgagatacctaaatgaatacagatatcctttatggtcattgtgctgcgcaatgcttctacaagctcgactggcgtttcgctatcagcttcctttccaattcgttgtacttttttaacacttcattctgttgtctcagataacaattttctgcctgcagtttctctaattcggaagaatactctggaccttttccataagaatattgctttccgacaggttgttcgaatcgatgtgtgtccccagctttataccacctgacccatgtctgcacctgcgtcttattctttatattcaattcctgcatgatctccttcacaggcacgcccgccaatctcatttctacagccttctgtttgacttcaaccggataactcactcttgccctcatagaaaaacacctccaagtctaatttcggataacaacgatccgttttcaaacttgaaggtgttttttgtttgtctcatattatggggtcagtcccggtttccggggtgttttggttattctgcaatcgcgtctgttaaaacaggaacgacttgtttctttctggatacgacgccttttaaaagagccgtgttgttttctaaagtcacgttgaatgctttttccacttttgacgcttgatcaccgatggcaagcgcaagggaatcgttttccagaatatccgtaatcacgagaaggaacaggtcaaggttcttctcagcaattacttttgaaagagccgcttctaattccggctgacgctttttaacatcttcaatatcaactgtgttgacttgggcgatttcgacttttttgctgccgagcgtgaactctttcgcatcaagagaaatcagttcttccacagtttttttgcttaagtcggcgcccgctttcagcatgtttaagccgtactcttccgcatctacgccggcaatttcagcaagctcttttgccgctgcgatatcttgctccgtgcaagtcggagatttaaataacagagagtcggaaatgattgctgacagcatgaggcccgcaatttctttctcgattttcacgttattttctttgtacattttgtttaagatcgtagccgtacagccgaccggctcagcacggtagtaaagaggttccgctgtttcgaagttggcgatacggtggtggtcgataacttcaagaacctgaacgtcttcgatatccttgatgctttgctggcgttcattgtggtcaacaaggatgacgccgtttacttcgtttgcggctgtttccaccaaacgcgggctttcctgcttgaaataatcaagcgcgtattgtgtttcgccgttgacttgtccaaggcggacgggctcagcattgaagccgagtttattttttagatcagcgtaggcaatggcagagcaaatggtatctgtgtctgggttttgatgtccgaaaataagaattttttccataataactccttgtccttttttgtagtgtaaacaatctttttatagtttaacacgtcttgaggagggtgtaatcttcaaaaccttaaaaattgatgtgaaaaagaagcatttttgttgagaggtggagaggattgcgagtaaaatactgggtaagtcagatgctaatcagcatatagtatcaaaaaaggtactatggaggatgaaaaatgaacatatatccgaataaagaaggttgtccggttgaactgacgctttccgttatcggcggaaagtggaagggtattttgttttatcatatgatcggcggaaaaaagcggtttaatgagtttcggcgcatttgccccagcattacgcagcgtatgctgacgcttcagcttcgcgagcttgaggcggacggcatcgtgcatcgcgaggtatatcagcaggtgcctccaaaggtggagtattctcttaccgaattcggcaggtcgctggaaccgatcgttttgcaaatgaagaaatggggagatgccaaccgggagtttctcgagacataccgggaaaaaacgtctcctcaagatcagtccgctcaaaaataagaagcagcaaaggattaaattccttgctgctttttttttatttcatcgcgatggcctttctggcgttgcgcacgtcatttttcagcaattcgctcaggttgtaagccggatattgaccgcgttcttccatatactcaaagaccatttgatgccacttgatggccgcatttaagtgcttgacgaagacgtgtcttaattgaggtgtggccgtctctgtaatggctccggcataattgcggacagatgttttggccagaatgagcaggccgccgctgtaaaaggaggaatcagcgcgctcttctgtttcatcctcacgaaaagcgggagcttcagggaagaaaggaagcagttcacgcagattttgttccagcgaatggatggaaaatctgtaaagctgttttaatctggcgtcgcttacgtcccgctctgttctttttaatttcacaagtccgtttgcctggaaagccactaactcatgcagttctaacgtttcatgccatgctaatgttctccgctcagtcatggtgtaagaatctcctttatccttcattttcactatcagcatatgccccggttccgatgttgttcctgatgttttgaagtttccagaaagggaaaatcaatgtaaaggaaatacgaaatagaggtgaaactatatgtgggacatgataaagaactttttccttttcagcagcggggttttgcaggcgaccactctcttacttatcgttatcgtcttgttatatgtacgaaaaactaaaaagaaaaacagagatacttctggtttcatggatgatcaggatcactgatacaacgggcattctttcactgggatgtccgtttgtctgttttcatgtttcacatggaacattggggctgtccgcgctcattttacttgcgatttcgacttatgttaaaatatatacgtgtattttggagagtttatggaaaattcaggtcttgaaagagacattgcggcgtcaaaagagcagtcgtctaagctgctcttttctattcgtatgttcgaatgatacaaggtttgaggtgagtaagtgaaaaatacaagggctctaatagaaggcgccattttgatcagtatttttgcaatcatttcccttttggtcgtgtacctccctttactgggggcaattcttctctttgctttgccgctgccgatcattctttacaccattcggcacggtctgaagcccggggtatggatggggcttgccagccttcctgtcagctttattgtaagttcgtttaccgggcttacaggcgcttttacggcggcctgtacgggaatcgccatgggatattattttaaaaagaaacagcccggctatgcggttgctgccggcgctatggcgtatgtgctgtgcggcgtcgttttttttgtggtcagcatcgtgttccttaacatgaatgtggttgataccaccatgtcccagcttcgggagtcgctgtctgtggctgataccatgtcaaaacagctgggttacggagaccagttcgggaagcagatcaagctgatggaaagtcagctgagcacggttcaatatctttttccgacagtgctcgtattgaccggcatcgttttttctttcctcagttatgctatggcaaggccgcttttacggcgattttcccctgatcttccgaagatgaagccttttagagagctcaaactcccgcaaagcgttgtcattctgtattttattgtgacgatattagggtttctgcctttagaaaaagggcatatgctgtattcggtttcattgaatgggggatttattctcagcttgctgatttgtattcaaggattagcgtttatttttttctattgccgcgaaatggagatgccgaaagccgttcctgtattagcaattgtgctgggggtgctttttccgctcatcttgtccgtgtatctcctcttaggcatcattgacataggctttaacataagaaataaggtgacgcgaaattgagtgtgacttacaggtggggagttgatagaaatgcctagtttttatgaaaaaccgttgtttcggtatcccatctatgcattgattgcattgtcaatcatcataattctcatcagcatttactttaactggctgataggagccatcggcgttgtgctgctcgccgtgatcttgtttttcattaagcgtgcggattctctgatcagaaaagaaattgacgattatatctccacgttatcgtatagattgaaaaaagtaggcgaagaggcattaatggaaatgcctatcgggattatgctgtttaatgatcaatattacattgagtgggcgaatccgtttttgtcttcctgttttaatgaaagcacgctcgtcggacgctcgctgtatgacacatgcgaggccgtcgtgccgctgatcaagcaggaggtcgattcggaaacgatcaccttgaatgagcggaagtttaaagtagtgattaaaagagatgagcgcctgctttatttctttgatgtgacagaacagattcagattgaaaagcagtacgaaaatgagagaaccgtgctggcatatatcttcttagataactatgatgacgtcacacaggggctggacgaccaaacgagaagcacgatgaacagccaggtcacctcattattaaatgcgtgggcgcaggagtacggcatttttctgaaacggacgtcctcggagcggtttatcgcggtgttaaatgaacacattttaacggagcttgaaaacgcgaaattttcgattttggatgaaatccgagaaaaaacatccgtccacactgtatcattgaccctcagcatcgggatcggcgcatcggtttcttccttgaaggagcttggagatctggcgcagtccagcctcgatttggctctcggccgcggaggcgaccaagtggcgatcaaaatgccgaacggcaaggtgaaattttacggcggcaaaacgaatccgatggagaagcgcacaagggtgcgcgcccgggtgatttctcacgcgctcaaggagattgtctcagaaagcagcaatgtcattatcatggggcacaaatttcctgatatggacgcagtcggagccgcaatcggaatattgaaggtggcgcaggccaacggcaaagaaggctacatcgtcattgatccgaaccagatcggatcaagcgttcagcgtctgattgaagaaattaaaaaatatgaagagctgtggtcgcggttcatcacgccggaagaggcgatggaaatttcaaatgacgacacgctgcttgtcgtcgttgatacacataaaccatcccttgtgatggaagagcgtctcgtgaacaaaatcgagcacatcgttgtgattgaccaccaccgcagaggcgaggaatttattaaagacccgctgctcgtttatatggagccatacgcttcatccaccgcagaactcgtgacggagctgcttgaataccagccgaagcggctcaaagtcaatatgattgaagcgacggccctgttagctggtataatagtggatacaaagagtttttcccttcgcacgggctcgcggacgttcgacgccgcttcttatttgagagcgaaaggcgcagatacggttctggtgcagaaagttctcaaagaatcggtcggttcttatatcaagcgggcgaagctgatccagcatacgtctctttataaagaacatatcgcgattgcttctcttcctgagaacgaagaggagtactttgaccaggtgctgattgcgcaggcggctgattccctcttatcgatgagtgaagtggaagcttcatttgcggtagccagacgggatgagcatacggtgtgcatcagtgcgagatcgctgggcgaggtcaatgtgcagattattatggaggcgctggatggcggagggcatttaaccaatgcggcaacccagttatcgggcatttctgtctcagaagcgctcgtccggctgaaggaagccattgatgaatattttgagggaggcgttcagagatgaaggttattttcttacaagatgtaaaaggtaaaggaaaaaaaggcgaagtgaaaaacgtagcagacggttatgcacataactttctcattaaaaaaggcctcgctgtcgaagcaaatgcgacaaacatcagcgcattgaaaggacagaaagaaaaagagaaaaaagaagcgattgccgagcttgaaagagccaaagatttgaaagaaacgcttgaacagctgactgttgagctgagtgccaaatccggtgaaggcggccgtctattcggatctgtcacaagcaaacagattgcagaagcgctgcaaaaaacgcataagattaaagtggataaacggaaattggagctccaagacggtatccgcacactgggatatacaaacgttcctgtaaagctgcaccctgaagttcaggctgtgctgaaggttcacgtaaaagaagaagcgtaatacacaatgaaaaacccgccgatccggcgggtttttttcatgtcagcagacggcgcagcgcaagaaaatgatgagattgtttcatttccgatcatcactagattgcatattatattacatcataacgaaggatgtgtcggtatgaaacgatttttttctgaaacatattttaataatccggagaataaaaaggcgctggagcactatccgctgatcggtgatggaaaagacggggaagtctatcgcttaacacacaacaaatgcgtaaaatacttctttgaaaaagggacatgcaaaaaggaattggcagctttaaagaccggacaaggttccccggtgattccaagactgtatgaatacggagatcgttatattgtgatggaatatgtccaaggcacctctcttgcccgccatatcaaacaagaaaaatccctgtccgtcaaactgactgctgatattttaaatatgctggatgaattaaaaagaatcggttttaccagatgggatgccgaaatcaggcacattctgatcaacgaacacggaaatcttaaggtcatcgaccataaaagagctttttccgccattacccggtttcccgtaaaactattaaaaggactggacaaatacggcttggcggatgagtttttgaacactataaaaaaattaaatccgtcacgttacctggaatggcagccgcacatgtaagtttctgaaaatccgcacatgtaagtttcctttttgtagggtcgtcatatgatatttgtaacatttgtttggtggagtgtggaaaaaatggcagaatacattatggttatcggcgctcatcccgatgatgaactattgggatcagcgggcaccataaaacggctgatcaatgaaggatataaagtaatttccgttattacggcattaggaagaaaagaagaagctcatcatattaaacaattaggcgaacgcgcgaatcaagagcttggaattgagaaagtcatctttttggagcacacgaatttagagctggaatgtatccctcttcataagcttgtcaaagaattagagcagctcattcgcgtctatcagcctgataaaatctttacacatcattacggcgatatcaatatggaccaccagagaacattccaagcagttttaacagccgccagaccgcttccgaatcaaaagcctatcgaactgcttacgtttgaaacgctatcttcaagcgagtgggagaggaatacggctgataaactcttcaagcctaattacttcgttaacatcacagacacaatggatgccaaactcgcggcgcttcaccactatgacgtagaaatgagggattaccctcatccccgttcatatgaaggcgtaaaacatttaggaaaagtcagagggatgacggcgggtgtggaatacgctgaagcttttgaagtcgtgcggaggatctggaaatgatcaagacattttccgtcccctatccgtatatggtccagacgcttgaccgctactacggggtcaaaacgcgcccgcgaaaaaaggcggcagtaaagacacagttgaaacatgaacatcatattccgcggttatacaggaaaaaaaagaagttatccattttgattgccacgttttgggactacccgcacacgggcggtttatcaaactatattaaaacgcttagtgaaggcctgaaaaagagaggtcataaggtggatgtcatatcccctaatctgtttccgtccgtacaggtaaaagaactgcgggcggctgttgttccgaaattaaaagatttctttaaagacagatatggggtttataacgatcatattttgaaaaataatcggctgatgtttatatacgagcaaatgcttcaaaagattcatttggaaagatatgatgtgttccacgctcaagatttatttacagccaatatgttaggcaggttcaatcaaatctataaaaaacctttatttttcacaccgcatggcatgtttactttcaacagacttaaatttcacatctttaaaaaaggctcggtagaagagatttattataaaaaattagagatgaaagccattgaatacgcagatcgcctgattattatcagcgatacgttccgcagcccgctcatgaagctcggagccgaacaggaagacatgacaacggtggtcacaggaatcgattacgatgcaaaaacaggcgggaaaagaaaaaccccgttaccgaaaaataagatcatcatctcgtgtattgccagattaggcccgagaaaaggtcacaaatatttactggacgcactttcgagaattccatctgatgtacttgagcatgttgaagtgctgatcgcgggcgacggagagatgaggagcgccttagaggaacaggctcgaaaactgaatctatctatggtttcctttttaggaaaaagagatgatgttcccgctattttgaatgtgacggacatattcgtactgccgaccattaatgatagtctgcctatttcgattattgaagcgatgttcagcggctcggctatcatcgcgaccgattgcgggggtattccggatctgatccgccataacaaaacggggcttattgtcgagccgggaaatgcaaaggttcttgcccgggctttagcgttttttatcactaacaaatctgcgcggaagatagctgcttcaaacgcaaaggcctacgcagagaaatatttaagcagtgagacgatgataaaaaatatcgaatcgatttatcaaaataccaacagctcggagggagatcatgaaacatgaacatgcggccgttgtacttgatttcagtgcaaacgggatcgggatgattcgaagcctggcccgaagaggaatcgatgtttacgcgtttgacacggagggaccttatcgtatcggaaaatcaagattggcagattgcgggatatgtcccagccctttaacacaagaggaagaactgctgacatttctgactgatttcgggaagcgatttcaagtaaaaccggttctgtacgcaggatctgatgattatgcgggattcatatccaaattccgcgaaacattagccgatttttttttatttttgctcccgagccgctctctgttagaaacggttttagataaaagcaaagcatatgaattagcggtcaagcatcacatcccctgcccgaaaaccttttttccgaacaaccaggatgagctggaagaggccatcgccaatattgacttcccgtgtattttaaaaccggtggccggccatgaatacagaaaaaaagtaaacaaaaaagcaattgtaatgaaggatgccgcacaattgcgcaaggagttcagctcctacagagaaaatggagaactgctcgtgcaggagatcatccccggagacaaccagtgtttttataaagtcgccactttttatgatgaccaaatgaaattaatgggcttattctctctgcaaaagaaccatcaattccctgcagattttggcgcgggggcccacgtcgtcagcaaacggcttcctgatttaatcgagaagaccctgccgttttttgaagcgattcagctgaagggagtaggcatggcggaatttaaaaaggatccccgggacaatgtttacaagtttatcgaaattaatccgcgcttttggctcagccatagcctgacagaaccggcaggcgttcatttcgtttacatgtactatctgtatttgaccggacaacatgtgaagccccagctcgaacaaaaagacggaatcaactggatttatgaggtgcgttatttcttaacgtttttgaagaaacgaaaaagaggagaaatgacgttccgggatttttggaaagggtgtaaaggaaaaaaagagtacgctctttttgcttggaatgacccgatgccatttatcagaaacacttggtctcatctcaaaaacagctggaaacggaagcggaaggaagatcggcatgtatgaaaaggatcttttgtatggcgcatttcaaaaactgagaattgacgaaaaactgtcgtattcgttcggtgaaagggctgcggtgaatccggatgacatcacatgcctgaaatcgacggacagaagcgccatttataaactgtttgtaaagaaaaaatccggaactgttccgctgatattgaaggtatataaatcttcccgtgaaaaaaataaggtcgagattaatatatacgggaaagcccattctgttttaggggatttgctgccggatatctatcttatagaagaaagtgaccatgaaacgtggatatttatggagtttgtcagccagatcaggggacagcttacatttcacccgaagcatttcaagtatattattccgtctgtcgcagaattgcacagccgcacctttgaaaacaagaatatttctgacggtaaatggcggtcgtggctgccggtatatggatcggaaaccatgagaaaagggcgtaaaaagcagatcaaaaagacagcggaattattggatagggctcttaaagatgagcgcacaaaagatatcgtgaagcctcattatcggcaaatcacaaacttgcttgagcaggaggagccggattttttccctgaattgatacaaaactgcacagccatcacacacggtgatcttcatatgcagaatatctgcacccacgatgcgtccggacatgaaccgtgggatattcaattcatcgattgggaatccgcaaaatacgcgccggtttggtttgatatgacggtgctggttgaaattctgcttggcttcagaaaagattggagccggcacgcagaagatattcggacgtattgcgtaaaagtgtatacgaaagaaatgaaaaagcggggcattcattttcagacccctcctatgacgctttataaaatggcttatttgcagagaacacttgaaaaagggcttcatacccaattgcggagaatcttcgacaatcggggaggagaactgctgccgtatcatgttgacaaagtgtcaaaatggggacgggaattaggattataagtttgagagagggggagcggatttgaaagaagagatcggcaagccgaacggtctggtgcctccagccttattgcgcgtcatggatcaattttacgggatcgaacatcaaagtgagccagagatgctgtattcgttctgtgcggaaggaaaaagctcccctaaacgaaaaaagccattgcgtattctgtacgcaacttttctccgttacccgaatgtcggagggttggcgagttatatcacatcaattaagacgggttttgagcgcatcggtcatcaggcggatgtcatctcgccgctccaaatgccgccatctttttttcaggaagatatcccgcgggccgctgacgagatcagagcgtttcttgttggcagatacggcgccgcaaacgaaaagtttgtgaagaatctcagctatttacatgtctttcaaagatttttgaaggagaaagacttagaacaatatgacctgtttcacgcgcaggatttatttgcggtatttttgctgggataccttaatcaaacgtaccagcgtcctctttttttcacgccgcacggacattttacgaaaagccggatgaagtttcataaaatccaaaagggttcaatagaagaggcatatttcagtgaaatagaaaggcagggtattcgggcttcggataaaatcattacaatcagcgactcctttcacgagcccttgctggagtacggagcgaaggaggcccagctgaagactgttcataccggtattcacattcaggatgcccctgagtcaaaacgtgctgaaaagctcgtgatcgcgtgcgtttcccgtctgaccgagcgaaaaggacatgatgtgatgctggacgctctcgcccgcatccggcaccatttatccggagttgatatatggatcatcggagacggaaacatgagagggtttctggaagagaagagacggaaactgggcctctcaaatgtgtttttcctcggaaaacgacgtgatgtgccggcgcttttggctgaatcatctatatttgtcctgccgacattgaatgataatttccctatagcgatcatcgaagcgatgttctcaggtcaagccattgtcgcaactgactgcggaggaatccctgagatgatccggcatgaggccacagggcttatttgtcagcccggcaacagccgcgaacttgctgatgctctcgtaatgctgattacggatcagtctctcagggaacggcttggaaaagaagcgcgctcctatgccggccggcatctgcgtcaggaactgatggtttcaaaaatagaaagtatttatcaatcatttttctgaatgataccggcgccgcatggcaggtgcttcaagagcaaaataaagaggccggcgtttaactatccagcctctttccgaactattttttcatctcatacagagtctgctgactttgtccgcccgggccgcccgtcattcctttccgggctgagcttgtttttccggtgctgtatgggtcagctgagatttttgtgccgttctttttcctccatgagacaagcttcgtattgcctgaattgtttccggataataagaaatatttcacttttccttcgtcaacaagttttttcagctgtgagacggttaaaatcggatcggttccgttcaaagaatgttttaccaaaattttcttcgcgaaaaaaagaggcggaaagccatcgcttccgcctcccgcacatatatatgagagagcagcctttatttgtgatcgttctcttttgggacttcagctaatttggcaagcagaatgtgctgaggcatgtgcatgattctctcaagcggcatattcagtgattctgcgagcttttgcgccgtttcggcggaaatttgcagcggtttcatgtgatcactccttccgtttctttattgtactaaaatcagaaatctatcgtaagaggatatgacaaaggaatggaggtttgaaaagcggggctttataacagaatgggggaggttttttatgcaatcgccattgatgttattacagctgaagctggctgattatcagaaaaaagccgcagaactgcggacaattgacgaatttattatactgaaacagacattgcaggacatgatgaaagtattcgccgcctgtgaagaatgggagctgtatcaaaaaacggccgatctcatggcgcagacggtgctgcacatccgtttcatcgaataagaaaagccctcgctcgggcgaaggcttttcttaaaaggaccgttcttcttcaatgtttttatgctgatcataaatgacaagcttagacgggctgttctctttagccgtctgctccgctttctcgatcgccgcgtcctttgatgtataaagagctgtcggcgccacattttccaccttcacaaaccatccgtccgcatcaacactgggtgttactgcatatgttttcatccttcttacctcctggtttcgatttatttatttgtttcccggcattcggaatggcgaaacacgcagccgctgtttgacaaatacagggaaagagatgtttttctattctttttcttgagaaatggtaaaatggagtttggatattttttaaggagaggacggtgcttagcatgacagaccttctgaatgatcggctgccgccgcaaaacatagaagctgagcaggccgtgttaggtgctgtttttttacagccgtctgcgttaacactggcttctgaagtgttgattccggatgatttctacagaatgtcacaccaaaaaatttacaatgccatgctcgtgctcggagaccgcggtgaaccggttgatttggtcacggtaacgtcagagcttgcgaataccgatttgttagaagaggtgggaggcgtctcttacctgacggacatcgcgaattccgttccgacagcggctaatatagaatattacgcgaaaatcgttgaggaaaaatccattctccgccgtttaatcagaacggcgacctcaatcgctcaagacgggtatacgcgcgaggatgaagttgaagatttattaagcgatgcggaaaaaacgattatggaggtcgcgcagcgaaaaaattcgggcgccttccaaaatatcaaagacgtgcttgtgcaaacatacgacaacatagagcagcttcacaaccggaaaggcgatattaccgggattccgactggttttattgagcttgaccggatgacggcggggtttcagcggaatgatttgatcattgtcgcggcccgtccgtctgtggggaaaacggcattcgccttaaatattgcgcaaaacgtggccaccaaaacggatgagagcgtcgcgatattcagtcttgagatgggtgccgagcagcttgtcatgcgtatgctctgcgctgaagggaatattaatgcccaaaatctcagaacgggaaatctgacggaagaagattggggcaagctgacgatggcgatgggaagcctgtcaaacagcggtatctttatagatgacacccccggcatccgcgtcagcgaaatccgttcaaaatgccgcagactgaagcaggagaacggattgggcatgattttaattgactacttgcagctcattcagggaagcggccgttcaagcgacaaccgccagcaagaggtatcggaaatttcacgggcgctaaaagcgctggcgcgggagcttgaagtcccggtcatcgccctgtctcagctctcccggggtgttgagcagcggcaggataaacgtccgatgatgtcagatatccgtgagtcgggaagtattgagcaggatgccgacatcgtcgccttcctgtatcgtgatgattactatgataaagaatccgaaaacaaaaacatcatcgaaatcattattgccaaacagcgtaacggcccggtgggcaccgtctcactggcttttgtgaaagaatacaataagttcgtaaacctggaaaggcgctttgatgacggcggtgttccggcaggtgcgtaaagcctcaagcaatgtcttgaggctttttttcatccgaaagaatgagagaatgccgtccgttcggcagacgaaaaaaagaaagcgcttttatataatggcattaagggaggaatgatgatgacaattgaatttccgcaatttcaagcggcgcaaatccggattgcccggccgaccggacagctcaaagaaatcatcaggttttatgaagagggactcgggctgaagagggtcggcagtttttccggacatgagggctacagcggcgtcatgttcggcctgccccatacgcaatatcacttagaattcaccgaagaaaccggcgcgtctcagccggcgcccgttccgcacggcgacagcctgcttgtcttttacatccaggatcagcaggaggtcatccgcatcagcacgaaattaaagcagatgggatatgaggagaaagcacccgaaaacccgtactgggaagaaaaaggcgtgaccatcgaagatcctgacggctggcgggtcgtcctgatgaatacaagtggcatataaatgactgtctgaagaaccctgattacgggttctttttcttgttaaagcatgaaagtttcgggagtaatagatagcaaatgaaagagaaaacgcttttaatcatgtttaaggcgaacaaatatagattgataagatttaaatgttcggatttacgattgactttctgtttcggcactgatacacttaatttgtttgaatgagatatcgttttgaaaggttaacggaggtgcacggatatatgtcttcagtagtcgtagtaggtacgcagtggggcgatgaaggaaaaggtaaaattacagatttcctatcagaaaatgcagaagtgatcgcacgttatcaaggcggaaacaatgcaggacataccatcaagtttgatggcgtcacgtacaagcttcatttaatcccatcaggaattttttataaagaaaaagcgtgtgtcatcgggaacggaatggttgttgatccgaaagcgctcgtaacggagcttgcgtatcttcatgaacgcaatgtgagcacggataacttgagaatcagcaacagagcccacgtcattcttccataccatctgaaactggatgaagtagaggaagaacgcaaaggggccaataagatcggcacaacgaaaaaaggcatcggacctgcttatatggacaaagcggcgcggatcggcatccggatcgcagacctgttagatcgtgatgtgtttgcagaaaagcttgaacggaaccttgaagagaaaaaccgtctgcttgaaaaaatgtatgaaacggaaggcttcaaaattgaagatattctggatgagtattatgaatacggccagcagattaaaaagtatgtatgcgatacatccgtcgtcttaaatgacgcgctggatgaaggccgccgcgttttatttgaaggcgctcaaggggttatgcttgatatcgaccaagggacatacccgtttgtcacttcatccaacccggtcgccggaggggtgacgatcggttcaggcgtaggcccgacaaaaatccagcacgtcgtcggtgtatctaaagcgtacacaacccgtgtcggtgacggtcctttcccgactgagctgaaagatgaaatcggggatcaaatccgtgaagtcggacgcgaatacggcacaacgacaggccgtccgcgccgtgtcggctggtttgacagcgttgttgtccgccatgcccgccgcgtcagcggaatcacagatctttctctgaactcaatcgatgtgctgactggcattgaaacattgaaaatctgtgtcgcttaccgctacaaaggtgaagtgattgaagaattcccggcaagtctgaaagctctcgcagagtgtgaaccggtatatgaagaaatgcctggctggacggaagatatcacaggcgcaaaaacattaagcgatcttcctgaaaatgcgcgccattatctggaacgcgtatctcagctgacaggtattccgctttctattttctctgtcggtcccgaccgttcacaaacgaacgtcatccgcagtgtataccgcgctaactaagaatttgcagcaaacaagcctccggtcacggaggcttgtttttttatgtaggaaaaaaataatagatttttttcaaaaaagtagttgccactttcgaatgttctatgatattataaatctcgttgttacggaacagcttcaatagagtactgcaagaaagcttttgtctgaatgctctatgatacataatccgacacatcaggagccattagctcagttggtagagcatctgacttttaatcagagggtcgaaggttcgagtccttcatggctcaccactttttatggcccgttggtcaagcggttaagacaccgccctttcacggcggtaacacgggttcgaatcccgtacgggtcattgatttactttagcgttattgctaactccttatttgtcctcggagggccgccacgatacggctctccggacaaattactgtaaggtccggtagttcagttggttagaatgcctgcctgtcacgcaggaggtcgcgggttcgagtcccgtccggaccgccattttactttactttatagtatagaaaagaaacatctggctcggtagctcagttggtagagcaacggactgaaaatccgtgtgtcggcggttcgattccgtcccgagccacttacccaaacgcatctgcaatagtaggtgcgttttttcttttgttataaaaaaagggagagccggcttttcagccggcccagaagaagacgtcaaacactagacggcgttttttttcgtgaggtttcaaaaaaatattatttaaaagaaaataaaaaacatgacaaaaggatggcagttcaatacgtttttgcgctgttctctttaatttttttatcttttgacctgaaaccgttataatagacggggaacgtttttcacgatccgaattgtgatcatcatgaaacatcaatagatgaaatgaagtcattctggcaggaggaaaatcaagatgatggataagaaaatccttgtagtcgatgatgaaaaaccgattgcagatatattagagtttaatttaagaaaagaaggctatgacgtgcattgtgcgtacgacggaaacgaagccgtggaaatggtggaggagcttcagcctgatttaattcttttagatattatgcttccgaataaagacggagttgaagtgtgccgggaagtccggaaaaaatatgatatgccgattattatgctgacggcaaaagactcggagattgacaaggtcatcgggcttgaaatcggagcggatgactatgtcacgaagcctttcagcacgcgtgagcttctggcccgcgtcaaagcgaacctgcgccgccagcttacggttgcgccggctgaggaagaatcagcttctaatgacattcatatcggttctctcgtcatcttccctgacgcttatgtcgtatcaaaaagagaagaaacgatcgagctgactcatcgtgagtttgaattgcttcattacttagccaaacatatcggacaggttatgacgcgtgagcatctgctgcagactgtgtggggctatgactatttcggtgatgtgagaacggtggatgtaacagtgcgccgtctccgtgagaaaatcgaggataatccgagccatccgaactggatcgtcacaagacggggtgtcggttattacttgagaaaccctgaacaggactaaccggcgatgaataaggttggtttttttcggtcgattcagtttaagatcacgctgatctatgtgcttctcattatcatcgccatgcagattatcggcgtgtactttgtgaaacaggtggagaattctcttctcaagtcctatgaattatcgttaaatcagcggattgacaatctttcctattatattgagcaggaatataaaggagataatgacagcaccgtcattaaagatgacgtcaaacggattttgaatgattttacgaagaataatgaaatacgggagattacatttgttgataaaagctatgaggtcgtcggttcctcgaggccttatggcgaggaaatagcggggaaacagacgactgacccgatttttaaacggattttctcaacaaaacaggcctattcaaaaaaatattatgatcctaaaagcaaaaacagagtgctgatttcagcaaaacctgtcgtcacagagaatcaggaagttgtcggcgcgatatatgtcgtggccagtatggaagatacctttaaccagatgaaaaccgtcaactcgattcttgcttcaggaacaggcttagcccttgttctgacggctcttctcggtatatttctcgcccgcaccattacccatccgctgtcggatatgcgtaagcaggcgatggaactggcaaaagggaatttctccagaaaggtgcggaaatacgggcatgatgaaatcggtcagctcgcaacgacgttcaaccatctgacgagagagcttgaagatgcccaagccatgacggaaggggagagaagaaagctttcttccgttatcgcgtatatgacggacggtgtcatcgcaacgaatcgcaatggagctattattcttttaaacagccctgcgcttgagctgctgaatgtttcacgtgaaacggctttagagatgccgattacgtctttattgggcataaaagagaactttacatttgaggatttagtagaacagcaggattcaatgctgctggagatcgaacgtgacgatgaaacgactgtactgcgggtgaatttttccgttattcagagagagcacggaaaaatcgacggtttaatcgcggttctttatgatgtcaccgaacaggaaaaactcgatcgggaacgcagagagttcgttgccaacgtgtctcatgagctgcggacaccgctgacgaccatgcgaagctatttagaggcgcttgcagaaggcgcgtgggaaaataaagatatcgctccgcgtttcctaatggtgacccaaaatgagactgagcgcatgatcagattggtgaacgacctgcttcagctttctaaattcgacagcaaagattatcagtttaatcgagagtggattcatatgatccgctttatgtcactgattatcgatcgttttgaaatgacaaaagaacagcatgtcgaatttatccgcgagctgccggacagaaatctgtacgtggagattgatcaggataaagtgacgcaggttctcgataatatcatttctaacgcactgaaatactcaccggaaggcggacatgtcactttctcagtcgatgtgaatgagaaagaagagctgctttatatcagcgtaaaagatgaaggtatcggcattccgaaaaaagatgtggaaaaagtctttgaccgtttctacagagtggataaagcgcgcacgagaaaactcggcggcaccggactcggccttgcgattgcaaaagagatggttcaggcgcacggcggagacatttgggccgacagtgtagaaggcaaaggaacgaagattacatttactcttccatataaagaagagcaagaggatgattgggatgaggcgtgaaaatataaaaacagtcatactgtcagtgctggtcgtcattagtcttgttttaacatggggaatttggacattccagcccaatttttcagaaggcacggcctcaaccaaatcgactgtccgggaaaagcataaaattgataaaacgagccaaaaagtgtcgcaaacggtaaaaccccgggatatgtttattcatacaaacggctctcattacaaagtggatgatgagacgctctttaatgacctgtgggcggatttgccgcaatgggaagtaaaagggatgaaggatatttccgatcaatacgacaagctcggttttaaaaattggctttacggcagaaacggcaattcggcaaagctcgatctgcaattcaatgacaccattccgattgatttcttccaaacgatgtttaaatggtcgaatccgtcaatggaatacagctcatttgaccatattgtcattccgtttaatgagaataagacgaataagaagatttacatggtctcgtacagtaagcagctgattttggaagtgactgtggaatcggcgaattaccgcaatctgatgaatgagctgtacagcaaaaagtcgagtatgccgttataccacctctattcggtcggaaaaagcaaagaatttctcatgccgaatgcgcggtttaatatgaaggaaaaagaatttatcactgaaaccattaagacgaacctgtttaagcagacgctttttaatgatccgagcacggtcagagaagacccgaattacaatcggaatgtgctgactgacggaatcagccgtctggaaatcaattcgacacagcggcagattcaattccagcatcggaacctggcacaaagcgcttcttaccaaacgggtgagctgattaagaaaagctataaatatttagaggatacgggaagctggacggatcattatcaatttttcaatgtgagtgataaccagcagctgagtttctacatgtttaaagaccaaatgcctgtgatcaacagcacgtctaagcctttcggatccggacctgttttgaccctgcaatgggccaatgacgaggttctcagctacaagcggccgaactatgttctcggaccgaatccgattaaaacaaaagacgtgaaaatgatgagcggcaatgaggttgtgtctttgctggagcagcaggttaaatacgacgtgaataaaatcgaccagatcttcctgtcctatcaaatggtatcttcgtcaacgaatgatcttgttgaactggaacccgtctggagtatgaaaatcaacgggaagatcgtcccgattacgaaagatctgctggggaaggaggaggacgataatggagtggaataagacaaaaacgatcttcatcattgccttcctcatcctcgatatttttctcggctatcagttttttgaaaaacgctcgagcagtgaatacgaagtgattaaaaattcaaatgtggaaaaagacatggagatggatcacatcacattcggaaacctgtcttctgattccgcgacgggctaccggctgacggcgggccaaaaggtatttaccgctgaagatattgatgctttgaaggatcaaaagccgttaatggagatgccggcggatgatcacaaggtcacaacgctgaaaatgaaatttaccgatccggtcggtttatcaaagcaaaaaccgcaggaggatgcggaatcgctcgtcagctctaaagtaaccggcggtgaaaaatataaactgtggaaagtcgacaaggatcaaaaacagatcattttttaccagacgtatgacggacagtttatttatcaggattttgactcgtccacggatgcgatcggacaggtgattctgcatctgaacgataaaaacgaggtcgtatcttacgagcagaccatgctggagtcattcaagcgaatccagacggagagcctgattcctgagcttgatgcggtcgaattattgtattctcaaaattacttaaaagcgaattgcgccgttaaaagcgttaagttcggctatattgcccaatatccgctgacaagtacgcaggtgctggcgccggtatggagaattacaattgaagataagtcaaaagggacgaagaaaaagacacagcaaacgtacactgtgaatgcattggaaagcacagtcattgataacaatcaaaataaataatggagtgagacacaatgggcttgcaatttagcgtgcttgcgagcgggagtaccggaaacgcgttttatctggagacagaggagcactcttttctggtggatgccggcctgagcggtaaagcgatggacgggctgatggagaaaatcggccgcaagatagacgacgtggacggcatctttgtcactcacgagcacagcgaccatattaaagggctcggcgtcattgcgagaaagtacggtcttcccgtctacgccaatgaaaagacgtggaaagcgatggagaatcagatcggcaagctggataccggacaaaagtttctgttcccgatggaaagcgtaaaatccttcggcgggcttgatgttgagtcattcggcgtctctcatgacgcggccgagccgatgttttatgttttccactaccaaggcagaaagctcgcactgatgacggacacagggtatgtgagcgacagaatgaaaggcattatccgttcggccaatgtgtttgtgtttgaaagcaaccatgatgtcggcatgctgcaaatgggcagatacccatggagcattaagcggcggattttaagcgatgtcggccacgtctccaatgaagatgcggcgctcgccatgactgatgtcatcggcgacggcacatcgcgcatctatttggcgcatctgagccaagacaacaatatgaaggaactggcgagaatgtccgtgcagcagacattggctgcgaaaggatttgtcgccggggaaacgtttcagttatgtgataccgatccgaaaatcccgacgccgctgtgcgccgtgtaatttttccaaatgaatcatgattattaatccgcgatctgacccacactataagcaaatcgagtactcttgaaaggatttgagatagggtggattataatcgcgatgatgaacagtacgcctccgaacagccccgccgcagcaagagagggtactttctatcaagtctgatcggcgtcatcgtcggggccgcgctcatggctttcctgctgccgtactggacaggcggagaccatggagaaagcagcaaaagcaccagccagcgtctcggcaacgaacaggtgaaaacagtcaacgtaaatgtcaatgacgctgtcacgaatatggtcagccgtgtatcagattcggtagtcggcgttctcaatatccaaaagaccgatatttggggagagggcggcgaagcgggaagcgggtcgggcgtcatttacaaaaagaacggaaacacttcttatatcgtaaccaatcaccatgtcattgaaggtgcgactgagattgagatcagcctgaaggatggctcacgcgtgcctgctgaactaatcgggagcgaccgtttgatggatctcgccgtgctgaaggtgaagtctgataaaatcaaatcggccgctcagttcggcaattctgatcaggtcaaagtcggagaaccggtcattgcgatcggaaatccgctcgggcttgaatttgcgggatcagtgacacaggggatcatttcaggcacggaaagggcggtgcccgttgactcaaacggcgacggacatccggattggaatgcggaagtgctgcagaccgatgccgcgattaatcccggcaacagcggcggcgctttgatggatatatcgggcaaggtggtcggcatcaactcaatgaagatcgctgaatccgccgttgaaggaatcggcctgtccatcccgtcaaagcttgtcattcccgttattcaggatttagaaaaatacggagaagtcagacggcctttcctcggtattgagatgaaatccttaacggatattgcgagctaccattggagccagacgctgaaacttccgaaaggcattaaaaccggggcggtcattatgggtgtcgacgcgttttcaccggccggaaaagcgggtttgaaaaagctcgacgtgattaccgggttcgacggacataaggtcaatgacgttgtggatctccgtgagcgcctgtatcgcaaaaagatcggtgaccgtgtgaacatcacgttctaccgttcgggaaagaaaaaaacagcggaagtcaaactgacagaagcggatcgattacagaaataaaaaacagcccggacatccgggctgttttttattgatttatttgttaatattatactattatgaaaacgggaggtgacacacatgaaaacggctgatgtgatcatcgtattgaatgaaattgaaggtgaatgtgaaggaagaattattttagaatgcagaatttaagaacatgaaacatgtcatatcaaacgtcctttttcagggcgctttttttatgccttttttcagaagccataaaaaaagaactgaacgcgggtcacaacacgttcagttaaaaatgggtatatttagaaaaaggcagacatgaacttagaactggtgctgctgaattgaagcggcagataatgatttttatttgcagattgctccgttttcagcgtttcctttcaccaattcagcttagattccgttttgtttcagataaaagcgaataatagaaggggaagcgaaaaaaataaacacaggctgatacatctaaggagagactgcatcatggaaaagttgaaaggcatcaagctgagtgcagacggcgagtctgcgctcattgattctttaacgatggggcttcattacggaacggtcctcggggaagacaatatcgtcgaggtgtacatccgttctttgcgcgaaaagctgaaggataaagaacacaaggtgattcgcacggttcggggcgccgggtacaggatgaatctggcatgaaacggctgtacagaaccctgcggttccagctcctgttcaggtcactggcgattttggctttgctgttatgtttcatcggcggtactcagtacatgtttatgacacggacgatgtatgaaaatcaggcgatcagcattcagagtgatatcaattcaatggatcaaagcgtatggaggtcaatcaaaacccttgcccgttccgaaacaccggctcatccgaatttgatttaccccggggtgacggttgcttttatcaatcaatcatacaagatgtctgttttatcagaagacccgcacgcgggggccgctccttctttcccgaaaaaagtgtacagggatgcgctgacagacaccatggcgcttcactatcaggtggctcacaatgaggcgggtgaggaaatcatcgtcgtgtttcaggcgatttccgttgacggaaggcaggcgggagttgtgcagatgagcacgctgacacagcctttgaatgattcgcttttccgccagatcagcattttcgcggtgctttcctttgcggctttggtcatcggactgtttgttttcttgccggtgatccggctcacactcaagccgctgtcccgcattgtgcgtatgatgggtgacatttctgccggcagtctcgataaacggctgccgatcgataggaagcaggccgaaattgagtcgctgggcatctccatcaatcagatgctggaacggattgaaacctcttttcaggcggaaaaagaagagaaggaacgaatccggcagtttgtatcagacgcatcgcatgagctgagaacgccgcttacctccattcacggctgtatcgaaatgttaatgcgcggagcggcggagaagccggagcagaaagaaaaagcgcttcaaagcatgtacacggaatccgccagggcgaataagctgatagaggatcttctgtttctcgcgaagattgaccgggtgccgagctttgaaatgaaaaaaggcgcattgggagacgtcattttggaaatggaggctcagctgaagctgctcgcgagaaaccggaagctcgagttctttgtcgatcaaaagatagaagccgtttttgacaaagacaaaatgaagcaggccattctcaacctcttttacaatgcggtgcagcatacggatgaagacacgggtgtcatcaccgtctccctgcagaaagacggaggaatcatgcttatgattgcggataacggaacgggaatcgctccggagcatgtgcctcatttgtttgaccggttttacagggcggaaacctcccgatcccgtcaatccggcggcgcggggctgggtcttgccattacaaaaaccattatcgacagtcacaacggaacaattgaagtgaaaagtgagcagggaaaaggctccgtgttcatcatccggctgccgggataaaccgggaagcaggaagaaatatcacaatttatatgtaaattctaaattttcaaaaaataacttgtccttttccaatattggtgataatatctagttattggtaaagggggtgtgtactgatgaagattgaagaacttgatcttgatacagaaacagcaagcttggtgcatcgctgctagtaaagccgtgactcccctcattggggagttattatctttcagggggtatgtcatgatgtcaacggactgtaagcgctggaagtttaaagacagcgtgcaggtgctgacctacacggcgcatattatcattcaatatcgaaaggcgattaagcttgcgcatacgagtgagatcaaagaggcggttgaacggctgatcatcggctgtgaaaaacaagagctttctgatcttctgggagaggaagcgggaaaccagtttttcgatgctttaatgaaattggatgctttaatagagccatggcaaaacggccgtgaaggccgcatcactgaaaagcagctgtaccattttgagaaatacaaccaaaaccccaatctgatccaaaagagattagacggcagcagggcagcgatcgtgggtctggggggcgtcggaacgatcattcttcaaaaccttttggcggcgggcatgcagcattttattctcattgatttcgatgccgtatcagtacataacctgaacagacaattcgtctataataaatcttctgtaggcaaattaaagatctcagaatgcagagattatattgcgggtatcaatccccatgcggacgcagcactttaccataaggaaattacacagccgcaggacctgcgtgtgttagatccgtacgaaattgatatcgtcataaatgccgctgacaaaccccataacatttctgaatgggtttaccggtattgtaaggagcggaatattgcatttatgaccgggggtgtcggcagcttcagcggccaatgggggcctctgctcacgcctgaatcctatcaatccggcgtcacctatgaaaaaaacatgtcggccggacttctgaactgttaccccgatgaaccgatcaaaggttccttaggagcgacaaacggtattatatcctcgtttatgtctcatgacattatcacataccttgcaggcggaagcccgaaatccctgaatacccgcatcggcctggactttgacggccttcatattacagaaacgaagctttctcaaaaggaaagcgctttatgaagacgatgcatcgtacggcgagaaaaccgggcgaccctctgaaaatagaaattgacacaagcccgatacgcttgaacccattagatacgcaggattacacaagcaagatgatttgcagcattatgtatgaaagcctgcaggacggctataactgccggatcatccgcaaagatccccgcacctgtcaggtggacattcacccggactatttaggtgacgccgagggtgtgattcaaacgatcatctatcatctgacgaaagaaaatcaaagcccccatctcggcagtttcctgaacataaaacaggccgttccgtatgtaaaaggcctcgtctcttccgatcagctcggggtgaacgtaacgggcgaaaaacgctttgaagtcaccttggacgagccgtctgatgaaatagaagccgttttgcagagcagctttctgattcctgggaccgccgggggcgatgtgccggaaaacggcccgtaccgattcaagcgcacgtttgagaaggggctggaatttgagcggaatccgcaatataaaatgacgcccgcggatcaccgcacggttcagaccatccaatttattttgaatgatgatctggaaaagagcatcgggctgtacgaagcgaatcaaacggacgtgacctgccacacccagtttcatcattcaaacatgaggtatcggcagtatgctgattttaaagaaaatcatttgccgatgttatttaccttcaaggtaaaggacgacatgctgagaactttcattcagcattattttgataaacaaaagctggccggggatttggggcatatcatcacaccgactgattcactgatcggtatatgggaaagcgggaggacaccgcagaaagatccgccccttttgacaagagaagaaccgatccgaatcgtttatgccgattattatcccaacggagagatcattgaaaggctggctgatttgtttcgacgggccggagcggacgtgtccgtctcccgcgtcagtcatttcaatgattattaccatatggataaaagccggtttgatattgagctccatttgttcctgccggcttacatgcatgagctgagctatatcaaatatttcatccgcgacatcagcgatccagggaagaaaaaaacgatcattgatgccgtaggatctgaaaaaaagaaggaactttttgggttattcgagaatacaactcattattgcccaatttgttttgggaaaagtctgtatctgcaagatccatgtatagagggttttagtgtaaagactgacgggctcctttctgttcatgatgttaaatgcagatagctggaaaggggtattcatttgcggaatcgaaatttgctttacttctccggttttttcggaaacttctttttcgaacggggaatttggattttatatttaacaagcatgaattattcattgtttctagtgggcatcctgcaatcggtcctgaatttggcgatgtttctggcggaagtgccgagcggcgtcatctcggacagaatcgggagaaaaaaatcgctcttgctcggccattttatggtcattgtctatttggtgatgttcctgagctttcataacttcatcgccctcttcatcgcccatattatatacggtatcgggctgacgtttatatcaggaacggatcacgcctttttgtttgattcactgaaagaacaagggaaagaaaaatggtacggcaaatccatcggaaactataacggacttgtcatactcggtcttgcgatcgccatgggcatcggcggctacttgcaggaaatatcatggtcgtatgtgtttatcgccgggattgtcactcagctgattgcaatggcggtcattacacagctgacggaaattaaatttgaaaacagtgaacacgaaacgcagacggtcggtgacatcttaaaagaagtcaaagatttcttcaggctgaacaaagcctttaaatatctggtgctgtcactctccgttttctttgcgattacatcggttttttatatgtacggacaagatctgttaagtcaggaagggctgtccgtgcgcaatatatccattatttttgcgggactgtccatcttgcaggcgctgtgctccatcttttcttccaagccggcggaaaaattcacgccgaggcgcgtgcttctgctgacattctgtatcatcggggcggcctacctgtttataccttcgggcagtctgtacgtgacgattgcagcttttgtcgtcattaacgcgctctatgatgtgatagaacccgtatccagtcaggtggtgaataatgagattccgtccagaacgagagccacgctgctgtccattatcagtttgatgacctcgctcttcatgttcattgcctttccgtttatcggattcttaacggactattttgattcagctttgctgctgaccgcaatcggggtattatccatcttattgtcgctgtttatgatgctcagcttttacaaactgaaagcgagcgtcgccatccagaataaagtcgagctttgaaccagaatgacaaagggatgatgtgagttgctgaatattcataatcttacggtaaatttagcgggagataccattttcaaacaagtttcttttttcatcaatgaaggcgaaaaagtacttgtggccgggccgaacggttccggcaaaagcacgctgttcagggtgctttccggggagcttgaggcagatgaaggaacgattgcgatcaacaaaggggcgaaggtcggtttgctgaagcagatcgctgatccccatgaagatctgacgttgtatcaatatctggaaaaatcatttgaagctctcgcggcgatccagaatgaaatgaaggccattgagctgaagctttcggaaccgatgagtgatgacgagctgactgctttattggaaaaatacagtcaatacacggaaacatttgagcggaacaacggctaccagatgcatgcgatgattgacgaggtatgcaacgggctcagcctcagcgaattaaaggatcagccgttttcaaagctgagcggcggcgaaaaaacaaaagccggccttgccgaaattttaatccgcaaagacgacgttatactgctggacgagccgaccaaccatttggatgtccatgcgattgagtggcttgaagggtttattaaaaaatcgaacaaaaccattctgtttacgacccacgataaaacgtttgccgaccaaacggcgatgaaggtgctcgagattgacgataccgaggtgaagatttggccttacggattcagcgaatacttgaaaaagcgggaagaattcatcatcgcccagtttgagaaatatgaagaacagcagagaaaaatacagaagatgaaggaatccatcgcccagctgagagattgggccaaccgctcaaatccgccgtctgtcggcctgcacagacgcgcgaataatatggaaaaggcactgaaaaggatcgagctgatcaataagccggtccggacggagcaaaaattaaaaaacgcatttcaggaagcgggcgccggttcaaaagatattgtgttcattgaaaacggaaaggtgaccaacggatcttcccttttatatcaaaatgtgaatctgcgcataaagcataaagacagaatcggcatcgtcggcagaaacggcgtcggcaaaacaacgctgatccgctgcatcatcggggaaaaagaactgtcggacggcaccattaaagtgggagaaaatcttaagataggctacattgatcaaaagagccacgtcggagattcgagtcagacgattctgcaattttttaaagaaaatctgctgactgaagagggcatggcccggaatatgctggccaagtacggattttacgggtcgtcggtctttaaaaaactttccgtcctgtcgggcggtgagagaatcaggctgaagctgtccatcttaatggaaaaaaagctgaatgtcctgatcctggatgagccgaccaaccacttggatattgaatctcaggaaattctcgaaaacagcctgatgcagtttcaaggcaccatcatctgcgtttctcacgacagaaacctgctggagaagttcaacaagattttctggcttgagaatcaaaacgtcaccatcttttcaggtccatacagttacgccaaacaaaaaaaacggcagattgccgaataaaaggggaatggatatgaccattgacagactgacaatcaatgagttatcgtacgatctttttgtaagcgagtatgctgataagaaaccttttattttgacgggggcaatggatcactgggaatgcagaccgtggacgcttgaatacattgacgaacactatggggacagaatggtcaccatccggaaatcagatatcgaaggggtcaaaacgtttaaacaagtaaagctttccaactatatcgagtacattgatcagaatgatgacaaatggtactgtgactggaactttacgcagctgaaccaaaatgacttagaccttgtctattccgcacccgagtattttacaaaagacacattgagagcggatgaagaaacgggacgggactggaaatggttctttctcggttctaagcagacaggcacgccgctgcatcaggattttaacaacacgcacgcgtggaacggcgtcattttcggggagaaggaatggatcttctatcatccggacgactctccgtatttgtacgaaggaaatatcaatgtctttgatgaaaaagacattgagcaaaaaccgctggtgcaaaaggcgtctccgctccgcttcagacaaaaggcgggagaaatcatttacgcgccgcgccgttggtggcatcaagtcgagaatacggaacatacattggcagtgagtgagaacttttggtttaccggagagcggcttgccaatcagatataacctgacgaaaggctgaggagcatctcagcctttttttgtatggattcatttcatccggtccagaccgaattttttcaggcggtattgcaggctctgtctgctgattccgagctcgtttgccgttttggatatgttattgccgtgttttctcaggatcttttcgatcatgtatttttcgaagttttccattttgtcttttaaatcggtgccgggctgggtgcttgcggcggctttggtttccgtgtcagccggtttgattttcatccggtattggtaaggcaggtgggccgccgtaatcgtcgtttcatccgtcataaagttcatggcgccttcaatcatatgttcaagctcgcggatgttgcccggccagtcatattccaggaagaatcgctgcacatcgtcactgatcgaatcgacatgcatttggaacaggtgattgtttttctggataaagacttcggccagaggcagaatgtcctccttgcgctcccggagcgggggaatgatcagtgtgacaacgcttaagcggtagtataaatctttgcgcagccgctcttccgaaatggcggtgatcgggtcttcattcatcgtggcgatgatacggacgtcaatcggtttgtcctgcgctgatccgatgcgcctgattttcttttcctgaagggcgcggagcagttttgcctgcaggctgagattgagcgagttgatctcatcaaggagcagggtgcctccctgcgcctgctcaaataagccgggctggtcgatggctccggtaaaggcgccttttttcgtgccgaataaaatactttcgaccaggctatccggcagggcggcgcagttttgtgagatgaacggggcgcctgagcgctggctgccgttgtgaatgctttgggcgaacagttccttgcccgttcccgtctcgccggccaaaagcaccgatgatgatgtgcgggttgcccgtttcgcgttttcgatgacttcccgaatgaccgggctgttgccgagaatactgtcaaacgtgtagctgttctgttctttcctgtgcatgttctccctgatcagccgttcgagcttggtgacgtccttggcgatttccacggctcccttgatctcgccgttttgcacaatcgggaaagtgtggttgatcgtcgtgatttcctggcctttgttattgaaatagctttgctttacgtttttaatcgttttgccttcttgaagggcctgaacgagcgtgctgtcctgctgattggaaaacataaatacatcagtcaggtttttatgcaggacgtcccgttcatccatatcttcaatctgcatcattttcttattgtaaatgacggtgctgcccttttcgtccaccacatgcagcccgacatcaatctcttccagaatgctttgtaacacgagtgtgtaaaattcgctggttgtgtgcaggtcaattccccctcccaatcgtcttaacattcattattttaaaataaatcgaacgggaaacgcaaaaaaattttgcgcttggacgatgtttaaaaataaatggaaattaaggtaataaaaccattgacttttttaaggaaatggttgatatttagatatatacttaaatatctaaattatgtatgtatgagagggggaaagtttttgaataaagcttttaaagcactggccgatcctacaaggagaagaattttggatttattaaagaaacaagacatgacggctggtgaaattgcggaacacttcgacatgtcaaaacccagtatttctcatcaccttaccatattgaaaaatactgatttggttcacgatgagaggaaaggccaatttattatgtattcattaaataccactgtattacaggatcttataggctggttcttttctctgactgattcagaacatgataataagaaaggcggggaatcatgaaaaaatatctcttttcggcaggaatcatagttttaactgttttcacatgggtttgcacatattcatctttaccggacaatttggcgacacactggggattaaacggaagtgcaaatgattaccaaacgaaagctaatgcgatgatgatgcttattggcatcatgattattctatatattttaatggttatcatccctaagattgatcctaaaaataactacaaaacatttatccggccatatatggctatatttaatacaatgtttgcggttctgtttgtcattaatctgattaccatcttgaccggtctgggatatgatctccctatatcttatttaggaaactttatagtgggagtcattttcatggtgtttggaaacttcattcagatcgttaagcctaatttctttttagggataagaacaccttggacgctgagcagtgaaagcgtttggaaggatacacacagggttagttcgaaactttttgtcttagcgggcatgctcatgatgcttgcagcttttttgccgccggtgtatagagtgtcagtcattttcatggctgcaatcggctgtatcatattatctttactatattcttacattgtatatcagagacaattgaataaataactgttgagtaggagcaatctaattggattgctcctattttgtcagcgggaaacgcaaaaaaattttgcgcttggctgaagtttgcacacaaactgccggaaaattttgcgggaaaagaaagaatgttggcgaaacatcccgttttttcggattggcacggaacttgctttataaaaagggaaagcaagatctaatgttgaatgattacaaaacaagggggaatcagattatgtcagctttcacaaaatctcaagaaattatcagccaaacttcacattacggcgcgaacaactatcatcctctgccgattgttatttctgaagcgcagggtgtttgggtaaaagaccctgaaggcaatcaatatatggatatgctgagtgcttattctgcggtgaaccaggggcacagacatccgaagatcattcaggcgctgaaggatcaggcggataaaatcactctgacgtcacgcgcgttccataatgatcagctcggtccgttttatgagaaaacagccaagctgaccggaaaagatatgattctgccgatgaatacgggggcggaagccgttgaatccgctgtcaaagcggcgagacgctgggcatatgaggtcaaaggagtagcggataatcaggcggaaatcattgcgtgtatcggcaacttccacggcagaacgatgcttgcggtatccctttcttcagaagatgagtataaacgcggtttcggacctatgcttccgggtataaaattaattccatacggagacgcagaagcgctgcgccgggcgatcacgccgaacacagccgctttcttattcgaaccgattcagggagaagcgggcatcgtcattccgccggaaggatttttacaagaagcggccgccatttgtaaggaagaaaatgtgcttctgatcgctgatgaaattcagacgggactcggccgcacagggaaaacattcgcggttgactgggaaaatatcgtaccggatatgttcatcttaggcaaagcgctcggcgggggcgtcttcccgatttcttgcatcgcggcgaaccgtgacattctcggcgtgtttaacccgggttcccacggctcgacattcggcggaaacccgctcgcttgcgcggtatcgctcgcatctcttgaagtccttgaggaagaagggctggcagagcgttcccttcagcttggccgttattttaaagaagagcttgagaaaatcgataacccgatcataaaagacgtgcgcggacgcggcctgtttatcggcgttgaactgacagaagcggcccgcccgtactgtgaaaagctgaaaggcgaagggcttttatgcaaagaaacacatgataccgtgatccgttttgcaccgccgttaatgatttccaaggaagacttggactgggcgatccaaaagatcacaaacgtgcttcaaaacgcgtaaaactttgatgcggcaatgctttccctcggcttgtatggaatttacaaataaaaaattcagcacactctatttgcgcggcgacagtattttagtataatgtatctttatgtacgaaaatgaatttaatataacattcatatacaaatagaggctctttggacagcaaatcggtttcaaagcaccggcttggttccaatacaagttgctgaaggggtgcagaatagtgaatacaaatcaaaaagagaatcagcttcagcgcacaatgaaatcacgccatttgtttatgatttctttgggcggagtgatcggcaccgggtttttcctgagtaccggatttacaattaaccaggcgggaccgctgggcgcggttctgtcttatctggtcggcggttttataatgtttttgacaatgctctgcttaggcgagcttgcggttgcccttcccgtatcagggtcgtttcagacgtacgcaaccaaattcatcagccccgctttcggtttcgcattcggctggctgtactggctcggctgggcggtgacatgcgccattgagtttttatctgcgggacaattgatgctccgctggtttccgcatgttcccgtatgggtgtggtgcctcgtgtttgtcggactgatgtttcttttgaacgctattaccacaaaagcgttcgctgagtcggaattttggttttccggtattaaaattttagtcattctgctgtttattattttgggcggcgccgccatgttcggcctgattgacatgaaacacggcgagcaggctcctttcttctctcatttttatgaggatggattgtttccgaacggcattaaggctatgcttattacgatgattaccgtaaacttcgcgttccagggaacggagctgatcggggttgccgcgggagaaagtgaaaatcccgagaaaacgattccgcgctctatccggcagacggtatggagaacgcttgtctttttcgttctctccatcatcgtcattgccgggatgattccgtggaggcaggcaggagtggtcgaaagcccgtttgtcgtggtgtttgaacaaatcggtattccatatgccgccgatattatgaactttgttatcttaattgcgctgctctcagtggccaactcaggcctgtttgcatcgacgcgtatcttatatgctatggcgaacgaaggacaagcctttaaatcgctcggcaaaataaataaacgcggcgtgccgatgaacgctctgatcgtgacgctggccgtcgcctgcctgtcactgctgtctaaagtggcagcgccggaaaccgtttatatgtttctcttatcattagccggactaagcgcgcaggtcggctggattacgatttccctgtcacagctgatgttcagacggagatacatccgcgaaggcggcaaagtggaagacctgaagtttaaaacaccgctgtacccggtgctgcctattatcgggctgacgttaaatacggttgttctgatcagcctcgcatttgattcagaacagcggctcgccctttattgcggcatcccgttcatggcggtgtgcgttatcgtctatcatctgtatgtaaaaaagcataagcagtcagaaaaacagatagagctttaaatcttttcgtgtccaagtcatctttgagaaacccgcacaggacaacatacaacatgttgaggtggaaaaacggatgaacaagaatatctcagttattggaatgccgatggatttaggacaagcacgacgcggagtggacatgggcccgagcgccatccgctacgcgcatctcattgaacggttatctgacatggggtatgcggtggaagacttaggcgacatccccgtcaatcgtgaaaaactcaaaaatgatgaagagctgaaaaatctgaactctgtgctctcggggaacgagcagctcgcccaaaaggtggacagcgtcattgagaatgagcggttccctctcgtcttgggcggcgatcacagcatcgcgatcggaacgctgacaggaacggcaaagcactataaacagctcggcgtcatctggtacgacgcgcacggcgacttaaacaccctggaaacatcgccgtcaggcaatattcacggaatgccgctggccgtcagcctcggcgtcgggcacgacacgctggtgaatctgggcgggtatgccccgaaaatcaagccggagaacgtcgtcatcatcggcgcgagatcgcttgatgaaggcgagcgtgagtacattaaggaaacaggcatgaaggtctatacgatgcatgagattgaccgcctcggcatgacaaaggtcattgaagaaaccattgactacttgtcagactgtgacggcgttcacctcagccttgacctcgacggccttgatccgagcgacgcgcccggcgtaggcacacctgtcgtcggcggcatcagctaccgtgaaagccacttggcaatggagatgctgtatgatgccgacatcatcacttcagctgaatttgtcgaagtcaacccgatcctcgatcacaaaaacaaaaccggcaaaacagcggtcgagctggtggaatctttgttaggaaaaaaactactataaaatatgcgcctccgcacctgcggaggtttttttgttgccacgaggaaactagcgggctgccaccctctttttgaacctgtaaatatgatatatttattacacaaaatgggaaagggaggtgtcctgacagatggctgaggtgatggcccacgaaacagttgcgaaaaaaatcagtgactggtatgaggaaatcaaaaagcacaacaccgaatcggctgaggcgttaagagaacaactgcttacggatctgcaaaatatgacacaaaatcaaacggtgctcctttattttaatttaattgattcccgctacaaacttttgatggaagagtatgagaaaacagacggcattttaaaaacgatccagctgaacgccgataaagaaaaaacagaccagatgattcaatactattattatttcttttccggaatgcacgagttttaccgtaaacggtttatgaacgccattaatttttaccggattgctgaaagcaggctccggcacataccgaatgagattgaaagagccgagtttaattatcaagtggcgattgcctactatgaaatccgccaaaactactttgcgatgaaccatgcggaaaaagcattagagatctacaaagccaatgaaatgtacgcggtcagagaagcacagtgtttaatggtgatcggctgtaacagaatggacttgtttcactatcagaaagccgaagagctcctgcagacggcggttcatcaagctgccaaagcgggcgatccgcatattaaggcgctcgcccactttaacgcaggtatttgctatgaaagacaggaaaagcttgaggaggcgcgggtcgagtttgaaacggctctcgatcaaaaggagcatttgcaatcagcgtattcggtgcggagtctgtacatgctggccagagtgttattgaaacaggaacaggcggatgagggccggttttggctgcataaagcgctgaatgccgctgaagaaaaaaacgagcccgtatacacccaaaagctgcgcatcttacagcatgtctttattgaccgcaatgaagaagcgcttgaatcagctttcgccgagttaagaaggaaagagctgtggagtgacgtttccgacttgtcgtatcaggccgcggcgcattttaaaaaacaggagaattacaaactggcggcgaagtattttcaagaatcaattgatgccaatgaccaaattttgagattaacggaggggattcgtaatgaaaacatgtaaattcattgtactctcagcagccttggcaagtctcatttcgattggattatttgcgcaaactggttcaacggcacaagccgaacaaatcataaaaccggcggaaaacggagccttcggataatacttcatgataccgctttcagtctgtgttttgtaaggagtgattcaatggctatcacgctgcagccgatgacaggacaagaatttcagtcctatctcgcccattcagccaagcattacgctgaagaaaaggtaaaagcgggaacgtggctgcctgacgaagcgccggagttagcggagctggcgtttgaagacctgcttcctgacggcttggagacggccgatcactatttatggacgctgacattggacggaaaggaaaatgccggctggctgtggctgcacgccgatccggaccacccgcagcaggacgcatttatttatgatttcggccttcatccgcctttccgcggcaaaggctatgcaaaagaggcgctcgcaaggctggaggacaaagccaaagacctgggtgttcgcaagatttctctccatgtgttcgctcataacgaaacggcgcggaagctgtatgagaagaccggatttctggagacggatgtcatcatgagcaaaaagctgtcatgaaaagaggcccgcacgatggggcctcttttgttattcatctaacaatgtcatcatgtgttccggataacgctcgccggccgccgtgccgatcggaaacatctcatccaaccgcgccttcacatcctcgggaagcacaatgtcgagagcggcgaggttctcttccaagtagtgtttcttttttgtacccggaatcggaataaggtcatcgccgtttgcaagaacccatgcgagcgcaagctgaggcgcggtgatattcatttcccgggcaatggcgttaagtttttggacgagccctatattcaccgccaaattgtctccctggaatctcggcgttcttcttctgtaatcatcggcatccagctgctcggtcgacgtcatctttccggaaagaaaacctctgccgagcggactgtaaggcacaaaggaaatgccgagctcacggcaggcgggcagcacatgctcctctgcttccctgctccataaagaatattccgattgaagcgcggcaatcgggtgaatgcggacggcgcgcctgatcgtttctgcggaagcctctgacaatccgatatacctcacctttccttcgtctatcagctccttcatggcgccgacagtttcttcaatcggcacccgcggatcaacccggtgcagatagtaaaggtcgatataatccgtcccgagacgtttcagactggcatcacacgcttttttcacataatcgggccgtccgttaatttcgataaactcacccttttcgcttcggacataaccgaatttcgtcgcgaggtaaagctcctttctgaatggggcgagtgctctgccgacaagctcttcatttgcacccaatccatattgatcagccgtatcaaacaaattcacgccgagatgaacggcatgatgcagggtggaaatcgactcttcctcactctggctgccgtagtattccgacatgcccatgcaccctaaccccattgcggaaacccgcatcgaaccgatcgttctgtccttcatatgtcctccccctttcttgtatgataaccggatttcctgatatttgaaaatggtttatgcatatgatttacatattgttataaaatttataaaaatctgtaaattatctatttttttatcgcaattctgtcatataatacaaatgtggaaaaattatactcaaagaaaagaggcgaagtaatatgtgtaaaaagctgttcaaagccgtcctcccgtttgccctgtcattcaccatggttctgtcgttctccggtttgaatgtaaaagcgaaagaaacagaagcagcccgctacgcaaaagaaatcgcagagcttcagcagggcacgactcctcaagacgttctccaatccgccaaagagcttgccaaacagaagcacgtttcaacagaagcaattctcaagcagtttcatcaagaaatcacggcagacaaggtgcagggaaatgtaatcgcttccaaagaagggttctctgcgatgggcggatcgtcaggaaccaaaaaacttccgaaaagcacaaaaggcaatatttattacacgaactcatacaccgcttattacaaccacgggcatgtcggcatgtattcatccgctgataaaattgttgaatctgtgccgggagacggcgtccgccagattgcttataacggcagagaagtcgaagacaattcaatcgttcagaccgtgaaagttaccgatgcccaaaaacaagccgccgctgactgggctgtatcaagagtcggtgatgagtactccttcaacttcgtcaataacagaaatacgggccatgaaggcgccaaaaactgctcaaaactgctgtggtcggcattcctcttaaaagccgggattgatatcgactctaatggcggcttaggcgtatacccgcgcgacatcacaagctcgtcctacacaaccacgattctgaccattcactaaggagaacaacgtgaaaaaaatcatttggatacccttagtgatcatcgccgccgcagcggttttatgcttcttctatttccgcacggaagaccctgcggaggttgcgagagacacattaaatgaccctgattttctgaaagataaagaggcgctgctgtacttctccactgcggctgaccaagacacgttcggcggcggaaaaagctacgccctcttcgccgatgaaaaaggacggctctcttcttatcacatgaaggggcttgagctcggatcggccaaagtgcatgacggcagcgtgctgctggaggacaaaaaaggaatctataccgttcaggacggccttcacacgtataaaagagcgtaccagcatacgggagacagcgcgggatatatcgagcgggcgaaaggcttttacacgctgtataattcgggctacgacaagagcggcggcagctatcgctcagagctgtaccgccagatggacggcaagtggaagcaagacgtcattccgcactatatccgcgcttcaggcttttttaaagatcatcttttcgcactcacgccgacagatgacgaaaaaggctatcacgtccaagacattcaggctgataaagagaagctccatacaaaatcaatcgcgacgtggacgtataaagaaggcacgtctgtcgaatcccagctcgtcgcggatgacagcgccgtctgctttgtcaccagaggggaaaaagcagaacacatctatcaaatggtgaaagtcatgaaaaacagcggcgccatcaaaacgtatgacatcgccgcttataaaaatgacgaacagacgatctatgactccatgccgttcagcttcaaaaaaagctttttcatggagcggcgcagcttctatttcgttgacggcttcggaaacgtgtaccgtatcaactctgagaccggaaaaagcaaaaaagccttcaagctccccgcatcacgaatgaaagccgacttcaaggagctgacccatcaaaacggaaagctgtatctgtttacgtacagctacaaaaagcctgccaaaatcgaatccttcgatctgaaaacgggcaaaaaactgaacggcctgaccatcccgggtctgaaagatatcgtgacgccgaaaagccatctcaagctgtatgatgtgcaggtgacggatgggtttgagaaggaaaagcagtcatcataatgaaaacacaaactttggattatataaacaaaaaaaccttttattggtttacctgtactcgtttgaggatatagagtagtagactgaataaaaggaggatatatagtgaaaaaacgtttcaaatggtttgtgggagtagttatttttgtttttatgttcagtttttcaggtgtgacagaagctattagtacaaagacaataaaagatgaaatcacatgccctgtctgtgataaaacgattaagtctgaaggaagtaaaaaagacagacaaaaagctttgaatatcgtcaaagacagagatgatttggatatagataaaacagaagtctttgtgactgttttaaataataaagatcataagattgcattggttcattatgaagatcagcaaaatcattcatttgcgcagaggtatattaatttaaacactgagcaaatcgttttatccgtagagggtataggaaaatgggacaaagaaaaaaaagaaggaaacttcaaattaagagttggcgataaagaaattattaatgaagattttaatcaagatggattaaaaggcaaggggaataatgctttattgaactctgtcaaaaaagcatctccgacaaaatcaaaattggagtcctgtaacgatttagtcacaaaaatgctggggctgggatccagtattgcttgcgcaggtgcttgtatggctgtcggaggtgctgtcggcgcagtagtgtgctcgcctttatgtttagcaattgaaaatggagttggcgaagcaggtgctaaagaaatttgtgaacaattctttggttgaaatatgcagatttgaaaagagcttgccgcttttggtaagctttttataatgaaacgttactgcaagaaagaaggtggtcatttgaaatcattcagtatcttcttattgttgtccgtcatttgcataaccattgtttttgtcataatgaatatgttgattggataccctgatgtgagtaacggggcagtgattatggttgtatatatcgttgtgaccctcttgataaggctatataacaagaaaaaagccgaccgaacatagagatagaggaatttaggagggagccgatgaagaaaaagcttgccgcggtgaccgtaaccattctcctggtttccgtaataaccaactcttttttaaacggcggaaagccggactggattgatgtttgctctacactgctggcgtgtctattaggaattctgttcgtccttcgcttagagaaaagagaaaacacgtaaagagccggatgctgaaaacaccggctctttttgcgcgtgatttgccgaattgtggataaaactcagcccgaagcactactaacatgtgtataaataggttatattgaaaagagaacaattgccgcgtgcaaaagaaaaccggaggacgtaacgatgaaaaccgcttattattcttgtgaagaacatatcgaaaccgtgctggacatgtacatagatgatcatgagcttccgcccgaaatcagaaaaatcgaacatactaacagtttatccacagcctgtgaattatgtggggacactgcaacatatctagtagggaacgaatgatcctacacaaaatacagaaaagatatccacaattgtggacaatatatatgaataacttgtttctaaagtggggatgacctgtgaatatcaatattgtgaccatcggaaaactaaaagaaaaatacctcaagcaaggcattgaagaatacaaaaaacgactctcagcctacgcaaaaatcgacatcatcgaactcccggacgaaaaagcgccggaaaacctgagcgaccaagacatgaaaatcgtcaaagacaaagaaggcgaacgcatcctggccaaaatcagcccggacacccacgtcatcgccctcgccatcgaaggaaaaatgaaaacatccgaagaactggccgatacaatagataagctggcgacttatggaaaaagcaaaatcaccttcgtcatcggcggctcactaggactaagcgacgccgtcatgaaacgggcagatgacaaactgtcattttcaaaaatgacatttcctcatcagctcatgcggctcatactagttgagcagatttatcgggcgtttcggattaatcgtggtgagccttatcataagtgagtggggttttgattaattatataaagtgattatgaaagaaagagtcactcaactattgaacgactctttctaaacgaaataaaaactgatttttttaccattcatttattaatcgtactaacttgtataattcttttttattagatgtcctctacaccaaaatacttatacaagcctttttcaatgcaatcttccaatgttccaccacaaagttctgcaactgacattatatcaatgtctttaaagcgaaatttatttgaataactattaatagatatgcttatttttaatctatttgcatcacttaaaatctctttttttactgcattattgctatgtacaatattatttctgacattcaaccaaaaccttattaattcatacttttttgtcccaacaataaagtggttttcttgcttttcaatgtatttttcgaaatatttaaggtatttaactataccattatcacttctattcataacatctttcatttcaggaagtgatggttcagattcaatgagtttcttggtcaggctaaataaagtcgattccaataaacttagaaacattacaatagatgctaaagaattcatttcaccctctaattctatttgttttaatttgaactccctttcggacacatgacgagattgaataacatctacccattccaattcatccgggtctttcgtctgttctcttaatctttgatacttttccaacatttctcgagattcttttaatttcgaatcaatttccaatttaagtctactaccatttttttttgaagaccttaatattgataaagattctaagtagtatgtatctacaatactatataaatctcttatcaaaagggacggtaaattatcttgtacttggcttatatgagaaagatgcgacattgaaaaataaaatttctgtattggaatttcctcgatattttctatctccataagcattaagcacctccgcaattccttatatattttattatctaattttcccattcgaatctatactaatgtgcattactaatagaataataggtaaattctaggtataatatactctcatgtaaatacagttcttaaaagaaatactcatttcatcattagagattctaaaaaaatcactaatattttcttattaacatgcttttttaaaaaaagaaaatgaaactgggcatcacctaaatgtgtaaaaagttataatataaattgattaaattttaaaagaatttatattactgctaatctttccttcaagatatattgatacaatacctgatatattcgatattagtaatgtacaccatctttagccaatgagtacttagaagaagaaaacactaaaaaacggaaaattagaagattgctttttaaaagaaatctttcttgttgcacatggaaggtatgaaaataaatggagtaatccccacttagaaactttacaagtaatattaaaacgaaaatttatttatttgttaatggattttgtgttgtaatctgatgattgagagaataaaaatgggaaatgtttgctaaacaaatagacctatgctataatttagaaaaggtcgaaaattgtagaagtatgaggctgtgttattaattgaattttcttttatttaaaaatgttgccgcatttttaaataaaaatatcttttagtcttactaataatttttataactaattgacttttaaaagaataacatagtgtggtaaaaaaatcaacacctattaagtttgtttaaaatatagtaaaaaattacaggaatgttaatttggagtaagacaaacttagacctctatcttttatttcttcggcttaataaccaacaagaaagcaggagatatattggcaatattaacagcaaggtttattaaagatggaatagaaaaggaatatgaaaagagtgatatcacgcccgacttatataatgaaaccttaaaaggttatctctattgtcctactaagaattgcggtgcaagggttatttataattctggtgtaaaaagctttttaagaacatggaatatggataaccatattgacgattgtattcatggttttacgagagctaaaaaaagggtaggtgttgatactactcaatttattaatgttgaactcactgctgagaggaaaaaaagggctttaaaagaagcttataagctatatactatgtctgatgatgaaaagacaatagagaaaacaaagaaaccaaccagaaaaaataatccgactactgttggaaaggaatctgttcccgtgactcacgctgttttacaagatggagatcagcctgaagaggtaactaatcgaaggataggtattagaggaccaaacctccccaaaaggacagtggatatgttaaaggatattgataatggaaaacctcgtttagtaatgggaaaagtaaagagtgtgaaattaatagaatcgatagctgatatcattgtggaagagggtaaaacaaatatccatgttaagtttgaagaagtattcataaataatagtccagcttatttagggttatttcatcacattttaaagtatcaaaaagaaaacaaaaatcaggatattgtattcactgggattggagaagtgaggagatccaaagttaatggagatttagaactttccgttttttatggaactgatttttctatagacggaatggatttaataaagctatcaatgaggaaatcttaaagtagaatttactaagaaagtcgttcaactattcaatgggcgacttttttaattatctttccatgataatgtgaggaaaacatttaaactaaaatttaataatatatggattaactgatttttattcatactcttctaaatgtaaattgcattttatcgagtgatcaataaatgagttactccttctttagacttaaaatttgaggttgctccggcatctgagttttttaatgaagagggaggacgcatttggtgttttaaggagttaaaggtattatcccttgtcggctgtaagtcatcgtacctgtttcacgattagcccgtgtaaaaatgaaaagggcacgaacatgttgatttctataaaaataaaattgaattcaattttattagtcataccttaaacgtctttttatttactcaatcgacattttatgagcagatgaaataagtatttcttgaagtctcccaagcatgatttcgtttagttcaatttgtaggtaagcttctattatcaattctaaatgcaaagatgtaaatgtataacagacccatctctagaaaggcgattctacctaaaaaaacagcgtttgtattggttttcattcttctcttacatattaataacgtcatggttatcttccacggaatttagtctgtttgctgatcattcatttttcaaaatttgttttcatttaaaataatgtttgcggtttgcagtgctaaatgaaataaaaaaagagctcaaggaatcatccctaaacctcataccctcacttcatataccgatactcccgtagcctcttcaaaatagccacttccctcaacaattcctctcccacattcgtttccttcactttctaccgctcaagctctttgtccactaatcgtttcaccgttaagacgtcggtgccggtgatcagaacttctgcctttgagtcaaagtgtttatcagcacctagctgcatgccgtaggagttgtataagagcgtttagccgacaatgcctgttgtggattggcaggctttggagaagccgccgtcgatgacgatcatttttccgtttcctaatgtctaccccgcccaaaaagaagccatcattcaagaatcccccttcaaacaacagcttcttccgcatttcccatatgtcagtataaatccctttgcgtcacggaaacctagtggaaaaggtctctgaaaggagggggcgtatgatgaaaagtgaaaaaattcaaaacaaaacatctttggtttggaagatggcgattgcatctgctgtttcgtgggaagcggcaaaactagttggctctgatcacccctatttagcgcctctttctgttatcttatgtttgcagccaacgatagatcagtcaattcgcttttcttttcatcgtattgcgggaactgcgattgggatcatgctaacgtcctatcttgtcagtcacttgccaatgaatggctggatgctggggctgttcctattaggcggtacttacattgcgaagtggttacgaatagatgtaacggttctacatcaggtagcgctcaccattttgttggtctttacgtttgaacgaaacgctaaagattatgcattcgaccgaatcatcgatacggtgatcggcgtcatcattgccatactggttcacatgttcctttttccgccggactacacaaaaaaggcagcggactcttttcaaacattggctcgtcagctttccggcacactttcagacctttccaaatgggtgcaatcagagtgggggcaaggaaaagggaaccttatggcgtatagaatgaacaatcttctgcaagagctgcatatgacaaaagagatgctgcaaacagcctctgacagcttaaaattcaaccccgtcagaaaaaaacataaaaatatcatttcaagctatcaaattgagatgcaaaagttgaacgccggatttgagtatctatcaaatatagtgaaaacgttaaaagaatgggaaaaagaaggagctttatcttcaagtgacaaaagggagctggggaatgatttacaagtgttaagtgaatactttgcgggctttaaaggcatacaacagggtgaaacagacaattggaaacagaaggaacaggacatgttattggaatctctccgttccgacatgctgtcgcacgcgccgcccggtcataaggtctataaagactcttttttttttagaaacgaaaaaattgctgaaacgtttgtaatgttttctggaaaaaaagaatacggatatacagatgcagatatgatcaggtaaaagcgggggacatgaaatggatgatatacaccggattttggatgtcatcgccaattctaaaaaagctaaggtactggctaccatcattaaagcagaggggtccgcttataagaaagaaggggcttcgatgttgattttaggggataaaacaagagttggaatgttatccgccggttgtctggaagaagatctcgttgaacggtcggaacaggtctgggttgcaggagagccgttgattgtccgctttgatatgagtgcggaggacgatttatcctggggacagggcattggctgtaatggtgttttgacggttttacttgagcctgtaaaaggagaattggaaagacatctgatgacagtcaagacatgcttagatgaaaaaaagtctgtgacccaaatgaaacgattcactaaaacgttagagctgaaggaagatctgtacatagtggaagacggcagcgtgtttggaaccggggatgttatggaacaaggccgtattcaaaaactgagacagacggaaaaggtaatcaagagggatgaacatacctctgatttattttttatccatcagatggtgccaaaaccttgtttatatgtcttcggagcaggggaagatgcgaagccgttagtttcgttggcagctcatgcgggctttcatgtgacggtgattgactggcgtcccgctttatgtcatcacggccattttcctgaagccggccatttgataacaggggcaccggaagaagtcatggaaggcctgagcatgacaaaaagggattttgttgtcattatgacgcacagctttcaaaaagatcagatcattttacatacaataaaaaacgagaatgtgttttataaaggcgttttaggccccagaaggcgcacggagcggctgttaggcggggcagagattccggcagatattcattcccctatcggccttcccatcggggcacaaggccctgaagagattgctgtaagtattgtcggcgagatgattaaagaaatgcgaacacaaaggtctcgcttatgaaaacagcagccatttacctggcagccggtacaagcagacgcatggggacggataagcgaagtttatttctgaatggagtctccctcggaagtatggctcttaaaaatgccttgttatctgaattagatcatattttcgttataacgggaaagggagatccactgcattggctttcggattttttctttttagatcccatatcaaataagtggagtcaggcagaatgtgagcaagcggataagggccaaggccattccatacaatgcggtttacaaaaagcggcagagtacgaggctgacgccgttatcattctccttgcagatcagccgtttgtcaccgcagatatcatcaatacgttaattgattcctatcagaaggagcaccgttatttatttatcgccgctgaaaatcaatatcttcctatgccccccattttattctcagatcaatgttttccagtattgcttcagttaaagggagatcagggcgcccggcatgtcatccgtgaaagtatgatcaatatgggaaaaatgatcagctttcaagaccctttgcttttttatgacgtcgatacagttgaagattatacgctgctgctgaataaattcggggagtgaatgagttggagtatatcgggaagagtgtcattcgaaaagaggcccttgaaaaagtgacgggtaaagcgaaatatacggatgattttcaagaaacaggcatattacacgcaaaaatgctggtcagtccatatgcgcatgccgatattgtgtctatggacttttcagaagcttggaagattcccggcgtgagagcgatattgggtgatgaaccttttccgcttgcaggtgaagaaattaaagacagatcgccgattgcctataaaagggtcagataccatggtgagccggttgctgttgttgtagcggaaaatccaattacagctaaaaaggcagcggatgccatcaaagtatcctataaacctcttcccgtcgtcaattccccccgtgaggcctttcaaaaggatgcgccgctcgtccatgaaaatgcggaccgctatgagaagacaaaaggtgtattcccggttccgaagacaaatatcgcaaacctggataaggttagaaaaggaaatattgaagatgggtttagggaaagtgatgtgacagcagaattccaaatttcctttaacccttctgatcacgctgcgatggaaacaagatgctcgattgttgaaattcgggcggatgaggagattatcattaccacatcctctcaagctccttttgccattaaaaaattaatggagtggtattttggaattgaacccggaaaggtgatcgtcaaaacgcctttagtaggaggagcgtacgggggaaaagcagccgttcagttagaggtgattgcctatttggcatcaaaagcagtcggaggccggcccgtcaaattgtttaatacgagagaagaggatctgatcacatctcccgttcatatcgggttggatgccattgtcaaattaggggctacaaaggatggaatcttaaaggcggcggacattcagcttttatttgatggcggagcgtattctgataaaggagtggacatcagccgggctgcggtggttgattgtacgggtccgtacgcgatcgatcatatacggtgtgattcatattgtatgtatacgaatcatccatatccaagtgcattcaggggctacagccatgctgaagtgttatttgcctttgagcggacgatggatgtattggcggaaaagctgaacatggacccattagaactccgctataaaaatgccattcgccccggtgacaccacaccgactcaagttcttctcaattcaagcacggtcggaaatgtgccgaagtgcattgaaagattgaaggaattaatgaattgggacgagggacagcgaattgaaatcgatggccggaagatacgggcgaagggaatcagctgcatttggaaaacctcaacatttgatacaaatgcaacgtccggggtgattctaacctttaatcccgatggaagcattaatttgatgtcaggggtagtggaaattggaacagggacaaaaacagtgctagcccaaatcttagcggaacgaatgaaaatggatataagcaaaattcacgtaaaaatgcttatagatacacaaacaacacccgagcattggaaaaccgtggggagcagagggacgttaatggccggaagagccgtactgaatgcagcggaggaagccattcgaaagctgaaagacgtggcatcatgtgtattgcgggttcctgtcgaggaattggaagtggccgacggaaaggtttattttatagatcatccttctgtacatgttgaaataaaagacattgcttacggatatacctttccaaatggaaataccattggcggccaaatcattgcgagcggcaattacacattaacccggatgacgaatttagaccgggaaacgggaagagggaagccgggacccgagtgggctgtcggtgctcagggaattgaagttgagttggataaacgggattatacgtatcgaattacaaaagcctattctgttgtggatataggaactgtactgaatgaaaaagctgctaggggtcaagtgatgggggggatgagtatgggaatcgcatttggaggaagagaaacctttgtatttgattcatatggcagagtattaaatcctcagcttagaacataccgcccccttcactatggagagcagcctgaatatatcattgaatttgttgaaaccccgcatgtgattgcgccttatggggcgcgcggcggcggggaacacggactgttggggatgccggcagcattgggaaattgcctttccgccgctttaggtgtccaattgaatcaacttcctctcattcccgaacgattatggaggacgcaagaggggtggaaagatgataccgtttgattttgattattttaaaccgaagaccattcaagaaacaatcaatctatttcactcgcttgcggccgaaaagaaaacaccaatgtattattccggcggcacggaaattatcacgttaggaaggctgaatatcatctatacggatgcggtgatagatctgaacgcgcttccggaatttcaaaccatccgcttttatgaaaatgatttggtgatcggagcgggcgtgtcattaacgaaactggaggaagaaaatccatttccgctattaagtaaaacagtaagtgaaatagccgatcggacgactcgaaataagatcagcctgggcggaaacatttgcgggggcatctattaccgtgaggccgtgctgccgttgctgatttctgatagtttgatagggattgcagggagagcggggattcattaccgtcccataaataaagtatttaacaaggaaatacagttgcaaaaaggtgattttttatttcatgtcgttgtcgatcgagcgtacgttgacctgccatttgtcagtatcaaaagaagacagcagtggaatgtcggatatccattggtgacagtctgtgcgctgaaaaaagatgatgagatcagaatggccttcagcggcgtatgtccatttccgtttcgttctgctgaaatggaggctgtgcttaacgataaaaaccgatcagcagaagaaagagtgcgcaggtctttacagtatgtacccaaacccgttcttgatgatgcagaaggctcaagtgaataccgaatgtttgtcttgcaaaatacaattttagatgccttacgggaattagaaggaggtccaaatgtctgatcctattacgttgaaagtaaatggcgaggaaagacagattacggtcaggccggctgatactttgttatttgctcttcgtcttcgtctcggattaactggtgcaaaaccgggctgcttaaatggggattgcggcgcctgtacggtattaacggacggggtgccgatgaaatcttgcttaatgcttgcggcagaaggggaaggaaaggacattacgacaattgaaggactgatcaatacaccgattcaaaaggcttttattgaaaagttcgcgtttcaatgcggttattgcacaccgggttttctcatgaattgtcatgctttggtgaatactgagccgaatgcaagtgatgacacgataaaaaattggctggagtccaatatttgcagatgtacgggttatagggagattgaagaagcggttaaatccgttttacatacagggaaaccgtaaaaaaagagcccagagaatcatctctgaactccattcttcatttcatataccgatactctcgcagtttctccaaaatcgccacttctttcatcagttcttcaccgacgtttgtttctttcactttcttccgctccagctctttgtcgactaatcgtttcactgttaagacgtcggttccggtgctcagcacttcggccttggagttaaagtgtttatgggcgacgagctgcatgccgtaagagttgtataagagcgtgtagccggcgatgcctgttgtggattggtaggctttggagaagccgccgtcgatgacgatcatttttccgtttgccttgatcggatcttcgccttcgatttcttttaccggtgtatggccgttgatgatatggccgtgatctggattaaggccgaattccttcaggatgtttcggcaggctgcttcgtcttcgcgcaaatagtaatacgggtttttcttttctttatgcgtttccttctctttaatgaaataccgctcaaaggttgtcatggcgcgttttccgaagagggaagagtattcgcctgtccataagtaccaagtcatatctgtcgccagatcttcggtttcttccggatgggcaaacgcttcccgtaagaaccgttcaaatacatcgagcagctctcggcccgcataagctttatcctctatcatcatcgtttccatgctgccgttttcatcgacgggaatacagccgtgaatcagcaggttgccgttatattttaaataaaggctgccttttttcatcataaaattcatatggcggcccagcttttcggagttctgaacagagaacagcagcttgtccatgacttctgcttcttcttctaacagctcgtcaggctgtttaggattcaccgtcgcaaagcaggtgttttccagttgatatgtttttccgttcagcgtgatttcattgcggtcataatcgatcttttccagtaacagccgttcctccatattaaagttcggccgtctcttaataatcgggctctcaagcttgaattggatcatcgcgatcgcctgatgaatttttgtgatttgtttaatctcatcttccggtctgttttcgtccgctttcgggcggaaagacgggttatcatcgtaatatttttcggcaaggttcaatagcggtctcagattgatgccgtaaacgtcttcaataatatccagattgtcatagcgggcacagatgcggataatgtttgccaggcatacttttgagccggaataagcgcctatccagagaacatcatgattcccccattgaatatccactgaatgatagttgatcagttcttccatgatcttatccggctgcggtccgcggtcataaatatcgccgacaacatgcagatggtcgaccaccaaacgctgcgtgctgtaggcaaggccggtgatcagcttatcggcctggccgagcgcaatgatctgttctatgatttcggaatagtattgttctttgttggcggcttgttctgttttgtacagcagctcttcagaaatataagcaaattgggcgggcagcgctttgcgcaatttggagcgggtgtacttggaagaacaataagaaacgagcttaatcatccggtgaatcgtttctttataccactcgtttaatgcctctttcgtatcaaagtcatgtttgatcagcttcagtttgtcctcaggataatagaccaaagccgccagttcatcaatttctctatcgtaaatgacgccgctgaaaatatcgcggatcttctcttttacccttcctgaaccgttccgcagcacgtgctggaatgcctgatactccccgtgcagatcactgacgaaatgctcggttcctttcggcaggttcagtatcgctttcagattaatgatttccgtgaccactttttcttcacaatcgtatttttgtgcgagcagatctaaatatttcgtttccaatctcgtccatcccctttttatttacgagcaattgtatgataaagtgaatttaaagtatgacataatgtttaaatgattagaccttatatgatagtaccgcataacgcctttttgatacaatgaaaacggaaaatacgcgcttcaggcatcaaaaattggaccgggataacgccgtgcagctcatccctctattgacaatgcattcaacttccattaaaataaaaagttagctgataggtgtttctatcagaaactcaatacgtagcaggctatgattgctgtgggtcgaactacagcaggagcggcttctggagagaccgcgggttttccgcggcgccgaagggttcacaatctcaggcaaaaggacagaagagtaccgaatatgtatttgtcatgctgttgattgtcagcggcgcagatataatttgatattcttatgaccatgagattggagggcatccaatctctttttttattggctttttttgctcgtcgttcactagagaggtaaggaggagtcagatgtggagcagcgagagctaaagagggacttatcgaatcggcacgtgcagctgatcgccattggcggcacgatcggcaccggattgtttttagggtctggtaaggcgattcagctggcgggtccttctatcatctttgcgtattttattgtaggtattgcgctttttttcgtcatgcgggcgctgggagaactgctgttatctaaagcgggctaccaatcattaacggatattgccgaggcgtatttagggccgcgtgcagcgtttgtcaccggctggacctactggttttgctggattatgacggctatggcggatgtgatcgccgtcggtgtgtatgtgaaatattggtttgatattccgcagtggattccggcacttatctgtttgctcattttattagggcttaatctgttaacggttaagatttttggagaattggagttttggttcgccttaattaaggtagtcacgattctcgcgttaattgtcatcggtgtggttctgctggtgattgggttcaaaacgcataccggaacggtttcagcggcgaatctgtgggagcacggcggcttgtttccgaacggattttcaggctttttgctttcgttccagatggtgatcttcgcctatgtcggtgtggaattagtgggtgtgtcggcggcggaaacgtcaaatccgaaaaaaaatattccatccgctatcaataaaattccattgcggattttatttttctacgtcggggcattgctcattcttttatgtattaatccgtggatgcagctgaatgcggcggaaagtccttttgtaaagaccttcagtctggtcggcatcccgttagccgcaggaatcattaattttgtcgtattaacgtctgccgcttctgcttgtaacagcgggatgttttcaacaagccggattttgtataacttaagcaaaacgaaacaagcgcctgcaagttttgcgaagctgaataaaaatcatgtgccgagccgcgcattatggatatcggttattgtgctgtcagctggcgctcttttaagcaaattgataccggaagcggcttttggcatcgtgaccaccatcagcgcgatttgtttcatttgggtgtggggcgtgattctggtctgtcatatcagatacaggaaaacccgtccggacttacatgcaagctcgtctttcaaggcgccgtttgcgccgtttatcaattacgccgtgctggcgctgtttgccgtcattctggtgattatgctgtttgcggatgcaacgcgcccggctttgctgctgacgccgctgtggtttattggattatttcttatctatcgggcgagagggagaaagacagattgaattgcttcagacggtgtactgccatgcagtatgccgttttttgttttgattggaaagcgagaatatttgttagaaatcaggctataatgattgtataatttaaaaaagtgtataattttaaattaagcgaggtgatgatatgaagtatgagaagttatctaagcttttttataaaatggatgctgattcatatgagaaagaatttaaaaagagaacaagcagctatggcagttattcaacatcattaaacatacgggggttccgaaaaggccgacccacggacgattcatttgagctattttatgtgaatacacataaactcatgaagctgaataatgaagtgttgttaaacagttccaaaatttcatcccttatcagtcagctccccgaatttgccgtcaaaccttattttgataaattaattattaatgaagcacagagtaataatgaaattgaaggaatccgcagtacaaaaaaagaattgaaagaggctcttaaagcgttagaacaatccgagccctcacataagcggtttgtcggattgatgaaaacatatcaatttatagaccgaattccgtcgtttacaagcattcatgactttagggaattatatgacgagctggtcgcagatgatatcggaacagaagatgcgccggatggtgagctattcagaaaaggctatgttgaagtgaacgatgggaacatgaccacccatatcggcgttaattctgaacagaagataacagaagcgcttgaggctttaattgcttatcttcatgatgaaacacatccccagctgtatcgttacatgacagctcattactactatgaatacattcatcctttttatgacggcaatggaagaacagcacgccttatcgttgggagttatttgtcccgatacttagaaaaatattcagccatcactttttcttacgcagttaataagaacaaagataagtattataaggcattagaggaaattcccgcacctttaaaccggggagagctgactttttatttaatggatatgctggagttgcttctgtcaggacaaaaagggattattgaggatcttgaatttaatttaatgaaactgaaacgaattaggaactatattgatagcgatcaatgggctgattataaagatgaacgtgatatttttaatatcattatcacgattaatgtatttgtaaatgatcaggttacgctgtcggtgcaagatttaatggagctctcaaataaatcgagacataaaattaacagagtaatggattatttagaacagcaaggatttgttgagctggtaagcagaaggccaaaatcttataaaatcagcgaggattgtttagaggaaatactgccttcttaattagtatatgtaaaaaagccgccattcatatggcggctttcacattaattccggatcaaataatcaaatgcgcctaaagcggcagttgcacctgatcccatggagataatgatttggttgtacgggccgtctgtgcagtcccctgcggcaaataggccgggaacgcttgtcgcgccgctcttatcgacgatgatttcgccgatgcggttgcgttcgaccgtttcgtctaaccattctgtattaggcacgaggccgatttggacgaatacaccttggagttcaacgtgtttttcttcgcctgtttcacggtcaacgaacgtaatgccgtttacgttttggtcgcctgtgatttctttcgtttgtgcatttttgtgcacagtgacgtttggcaggctgtaaagacgtttttgcaggacttcgtctgctttcagttcaggcgcgaattccagcacagtcacgtgattgacgatacctgcaaggtcaatcgccgcttcgattccggagtttccgccgccgataacggctacgtctttgccttcaaacaatggtccgtcacagtgcgggcagtatgcaacacctttgtttttgaactcttgctcaccaggtacgttgacattgcgccagcgggcacctgttgaaaggatcactgttttacttttcagtacagcgccgttttcgagttcaagttcgaagaggtcttttttctcaaggcgtttcgcgcgctgaaggttcatgacgtcaatatcataatctttcacgtgctcttcaaggcttgcagcgagcttcggtccttcagtcgctttaacgctgatgaagttttcgatgctcatggtgtcgagtacctggccgccgaagcgttcagcgacgacaccggtgcggatgcctttacgcgccgtgtagatggccgcgcttgcgccggcaggtccgccgccgacaacaagaacgtcaaacggctctttgtcggcaaactcagacgcatctgcgccgctgcccatttttgcgagaatctcttcgatggtcatacggccgcttccgaaagattcaccgtttaggaaaacagtcggaacagccatgatgtttttgctttctacttcttctttgaatgccgcgccgtcaatcattgtatgagtgatattcgggttgagcacgctcatcatgtttaatgcttggacgacatcagggcagttgtggcacgtcaggctgatataagactcaaagcggtattctccgctgatgttcttaatctggtcaatgaccttttgatcagccttaggcgctctgccgctgacttgaagcaatgccagcactaatgatgtaaattcgtggccgagaggaacaccggcgaatgtaacgcctgtgtcttctccggtacgattaacgctgaagctcggtgttctgtttaattcagttttttcaactgaaattttagatgacatggaagccagctcgtcaacgagagccagcatgtccttagaagtgtcatcgtcaccggcgcttactttgagaacaatgtcgttctcaattagctgcatgtattgatttaattgtgctttgatatttgcatcaagtaccaatggaatgcactccttagattttacctaccaaatcaaggctaggtgtaagtgtttcgccgccttcttcccatttagccgggcagacttcacctgggttttgacgaacatattgagctgcttttactttgtttacaaggttgcttgcgtcacggccgataccgcctgcattgatttcaactgtttggatcacgccatcaggatcgatgatgaatgttccgcggtcagcaagaccagtttcttcgtcaagaacgtcgaagttgcgggagatcgtttgagatgggtcaccgatcattgcgtaagtgattttgccgattttttcagagctgtcatgccagcctttgtgtacgaagtgagtatctgtagaaacagagtatacttcaacacctaattctttcagtgcagcgtattgtccttgaagatcttcaagttcagtcgggcaaacgaaagagaaatccgctggatagaagcagaaaacgctccattgacctttcaaatcttcgtttgttacatcgatgaattcaccgtttttgaaagcttttgcttcgaatggcagtacttcttttccgattaaagacataatatcttcctcctgaaatgtgatttgaaatatattaaaaagacaaagcattcactttatctttcaataataattctaattatatatagattattaaataacatttattttttgtcaagctatatggggtattattttctgcttttttttgctttagacgtctaaaaacgcctggtataagcggtttggcgctgtttgtcatgtttagcgccgggcgaaagggggattctcaattggtgaatcgaaacagtaggaatcaacccttctatatggcagtataaaccaaagggggtatgatcatgcaaataaataacattactttgtacagttgtgcgttggaggagacgaaacacttctatgaatgggtgttaggtttttctttaattgatgagtccggtgattcgtttaccatcaaggcgggagaaagtgagttgaaatttaggcgcgccgattctcactctcatccgacgtatcatttcgcgtttaacattccgaataatcgttttgatgaggcgaaggagtggataaaggataaagtcgtttttcaaacggaagatggggaggatgaggtgtatttctctcatattcaggcgcgttccttttatttcaaagatccgtccaacaatctggcggaattcatcgcgagagaaacatcgccgccaagcgcggaacatttttcgattgagtccgttctgaatatcggcgaggtgaatctgacggctgccgaagtcgtatcaaccgggagggagctgcagcgtttcggcattccggtgagaaagcatgcgcctcttagggaaaacgggtttcattttatgggtgattacaatgatggggcgtttttgcttttagggccgagcggccgccgctggattttttctgatcagcatgcggagttccatccgctgtctgttattgtgaacgggacgatccgcattgaggctgacggaaagggcggcattgacatcaggcgggcacagccgtcataaaaaagcccgggctcaaaaggcccggacttggggacattatttatagacaacacgggtgctgcacatgatgtcgtgcagcgtttttttctctccgaaggcgcccatgatgaatccgatataaagaatgagcttagatatgatatatgcgaaagcgcgtccgaaggcctggccgatggaaatccgtccgccatcttcattgacgaccttaaggccgagcaatgcttttcccagggtcccctgcatctttgaggccgtgagcaggctgaaatataagatactgatcacaaaagagctcacaagaatcgggatgacgccgaacaccagaaaagagatgttaaactgattttcggtcatgaaggggtcagccgccgcaacgcctgccgcaaataaaaaagagaccataaattgaatgataaaaatcggaattcctatgatgatttgatcaatgacgtaagccagaaaccgaatccaaaatcctgccggtctttccatgtatctttttctctcccttgctttaatctggaatattatacgtaatcattccaaattttgcaacggagcttaagcttccgcgagcagcctctttccccatgccaagcgtcccatgatcagcccgaaagccagaagggcaaacatgatgccgcaccacatcagctgatggattcccaagtgtgaaataaaccagccgcccgccgccgttccgatggtgatgccgaggttggaaaaagagacaaacaggctgttgccgaattcgggcgcctcctttgcttccgcagtaagccatgtctggctgacaatgagaccgccggaatgaacggcgccccatacgaagacgagaacggccatcggcgcgaaagacgtcccaaacccgtatatgagcaagtaggcggctgtataaagaagcggaaacaggatgacggtctttttcatatttttatataacaaagcgccgaagacgaaattcccggctatcataatcaccccgaagctcatcagcatgaagctgacccatgtgccgttcatatgggacacccgtccgaggtactccgcaaaatagctgtagacagaaaacatggccgcaaagagacaggtgacggcagcgatattgagccacaaagccagtttgcgaaggatgccgagctgacttctgaaagacattttttctgtgaccggcatggatggcaaaaagagaagaatgcccgtgaatgcgatgagactgatgatagcgccgaataagaaggcggcttcaagggagagacgctccgccagataagacgtgaaaggcacgccgaacgcaaagccggcggtgatgcctgaaaagactttcgttacggcttttccggattggccggcggggacaagccgggccgcggccgcaagcgctacagaaaagaacaccgggtggcataaagccggaatgatccgaaacgccagcatgacactgaaatgcgccgtatacgcgtagaccgcatttgaaacggcaaacatcagcaccgccaaaagcagaatgactttccggtttatgcctgaagcaagcaaggtcaaaaacggccccgacacagcgacgatgaatgcgaaaatactgacaagccaccccgcttttgaagcggtaatttgaaatctgtccgccacttgcggaagaaccccgatgatgcccatctcggtcgtaataatcccgaaaacccctagggccaaaaatagaatgaagatggaactgctttttttcattgttatgtatacctccttttataactacatatacagaaaaatagatatgttagaacaaaaaaagccctcctttcatggttatagctggtgctgaacatagtcagcaaaggctttaatttgtttttcattccttctgtaataggtccacttcccgattcgttcagattccagcaggccggctttttgcatggtcagcaggtagctggagatgacggactgcgcaagccccgactttgcctgaatatcaccgacgcaaattccggtgcggaaactgagtccctgatcaagataaggtctttcatcaaaatggtcttccgggtgtttaagccacgtcataatatcacttcgtgttttgttagatagcgctttatgaatcaatatcggttccataacgtttattatatctatttttctggatttgtaaattcgtttttaacaaaacattctcaaagtaactaaatatcgtgctaaaatataacatattatcagattaccggtaaaaaagccgggttattgtcaggaggatattcacatgaatcaaaagaaaaaaggtgcggttgcgatgaccttgctttccgctctgctgttttgtttattgccggtcatcggctcgctttctccgtttgcagaaacggggccgaacgcgaatcgttttaattccgcgggcatgtgggccgccgtcggtcagatcctttttatatatgcggtcccgctcattatgtatattctcggtgttcgtgtcatgaaaatcatcatggccgttttttgcggaatcgggcttctcatttgcgcggctgtctttttggtaacgttattggtcgtaacttcttcggaacaggagctgtctctttattacggccttctcgtttggtcaggcgcggcttttatcgtcaatgtggtgtggtatattgccgcgtttcgatcatccccgaagcatcagcaggctatgtgacatttgttctataaatctgccgaaaatacaaatatttcataggttaattatggtatgatcgaagtgatatagcagcttttaatagaaacgggaggaactaacattgaaaaaaaagacagcttcattgcgaatgaaaacattggcggccggcgctgcggttgctgcggctttatctgtgggagcggtttctgatctgccgggggcaaaatggctgcatccggcggctgctcaagctgcggaaacggtatttaaacaaaatcatgcggcatccggtttcttggcgggacggtatgacgcgcaggcgatgtctccgacgatgttcaactggtcaagagaaagccggtttacaagcactgccgatggcgcgttaaaatgggaaaagaatgttccggccaatcctcaaaacggtgcgggagccgcggttgacagggacggcaccgtatttattcaatcaaaagacgggaagctgacggcgtatcatccggacggtactgtgaaatgggtgacggaaaacctcgggacgacctatacgctgactccggtgctcggaacaaacggtgtcatttatcttccttctcacgataaaaaactatatttcatcgacaaagaaaccggaaacattttaacatcggttccgctgagcggagcgcctagttccgatgcggctatcggctctgacggcacgctgtatgtgtcgacgctggataactatatctatgcgattaaaccgacgtcgccttcgacatggacgcaaaagtggaagtttaaaacaaacggcgtggtcggttccgctcccgtgttagcatcaaacggaacgctgtatacggcaacgtacaataatatcttttacgcgatcaattccggaacgggccaagtgaaatggtcaaaaacgacgtccaacgggtttaaaggctatccggttattgatagagacggcaccgtttacgccggaaaccaggacggcaacttatacgcctatacatcaacgggtgctgtaaagtggacgttcccgttaaacggtttctccagctcttcattagcgatcgaccataacggcaatgtgtatatcggttccggaagcggcgagctgttttccatcagcaaaaccggcaatatgaactggtctttctatacggacgggcctgtgagaacggcgccgctgattgatgcggacggcaatgtgtacttcggttctgacgataaaaatgtctatgcggttgacgctgacggtaatgaaaaatggcgctatcaaacagacagcaatgtcatttcctccccggttctggctgaagacggcacgctttacgtcggcacttatacgaaactgctcgcattcggggcaaaaaaataataaaaaagaatccgcgtcatctgcgcggattctttttttatttagaggcttgtataaatacgcctttttcatgagaaaattctttaaagccgtacacaccgtgatatgaaccgatcccgctcgtattgacaccgccgaacggaaggttgacgtcagtgaaatgaacgacgacatcattgacagaagcattgccggatgtcgtatgctgcagcacataatcgatcagctcctgattatggctgaatacatacaaggcaagcggcttgtcccgttcagtgatgtaatcaacggcttcactgatatcttcgtaattcataatcggcagaatcggtgcgaagatttcttcctgcatgatcttcatatcaggcgtgacgtttgtcagcacggtcggagaaatcgtgcggtcatgcgcatcgaatacgccgccgaacgccgttttcgcccctttttcaatggcgtcatcatacagggctttgacacggttaaagttgcggtcgttgacaatctgcgtgaatttgttgcggtcaaccgtatgatcatcctccataaaacctgcattgacaatggtttgcaggagatctgtaaaggtgctctgcacttctttcttcataaggagatagtcaggtgcgatacatgtttgccccgcattgacaaatttgccgacggcgatttttttcgccgcgtccatcaaatcatagtcgctgtcgatgatcgtcgggctttttccgccaagctcaagcgtgacggacgacaagtgcttcgctgctgccgtcatgacgattttaccgacattcgtgcttccggtgaagaaaatgtggtcaaacggctggtcgagcagttctgtggcgacatcgacctcaccttcaaaaatggcgacttcttcttcgtgaaatgcctcgcgaataactgtcgcggcgatatggctcgtctccattgtaaaatcggacagcttcacaatcgcgctgttgccggccgcaatggcagctgcaagcggagccatcgtcagcataaacggataattccacgggccgagaattaaggtaaggccttttggctcgtacattaatacgccgtcagcgtcgggactgacggatgagccgacgcgtttcggcgccatccaggtgtcgagattgttcatattatctttaatcgccttaatcgttccctgcgtttccgctctttttacctcatgataaggcttgcggacgtcccgtctgatcgcctcgatgatttcttcttcatgtgcggtgacggcatctaaaaagcgctgaagcttttctctgcgctgcccggctgttgaagcacgcagcgttttttgattttttttctgaagctcaaagacgcgtttgatgtctgcttttatatgctgatccatcggtcttcctcctctggttgcttttttgtttcttcagggcctattataatgtggtgtgtttttgcggcaaagacagcgtaaacacatctatacgttaccgtacaaattgcggtgatctgtctaatgaaaggagtgtctcttatgccggattctgtgacaactgacatcaaacaagcgcttttggccatgcttggagagcgggatatccgccgtgtgaccatgaaggacatcgccgaacgggcgcgtgtgagccgggggacactgtacctttattacgaagataaatatgcgattttagaggatatagaggaagaaatgaaagacgggctgagcgaagcgctgtatgattcactgaagaataaagatgtgcttcatttacatggcggatggcaaaaagtgcatccgaccctgtcttttgttgaccggcatcgggtgtttttccaaacgatgatggatcgcaataaaatgccctattttcactttcatgcttttttaaaagatgtgttccggcatgatgtgctgctgtcaccggtcaattcggatttctcaccgactgaacaggatatgtacattcattaccgcgctttatacacgtatgccattgtgttgtactggctgaatgaggagcccggggcatccccggaagcgatcagcggacaggtgtgggatttgatttctcaaaaacggttttactggctgttcggccgccgggtgccggaacaagaagaaaaaaagcccgccgaccgccgggtgacaaggacgaggcaggccttgcaagaagccatgatcggcttaatggcggaaaaaaaagagtacgcggcaatcacgatttccgatattgcccgtcaaagcaacctccgccgtgccactttttatgaccattacgccaacaaagaagcattgctgaaaacgatcatccatcaatcatgccgggatctgatcggattattgacggtaaaaggagagcctgccgactgttccatggaagaagcggaatccgcgctcgtcggtctcttttcggcgctgtcggacggcctgccgctcgttcattttctgagagagggttcgggagtgcctgacgtcatcccggaaatgttcagagcgctgcaatcgttttatcttcatcagcccctgcacattcaggcgggcaaaaaactctatgcatattatgtcgcgtccatgctcgccggtttgattcaatatcgtcttcatgaaggaaaagaccacgcgccggatatgctggcccgggagtttctgcagtttttggatgtaaagaagtatcgggtgattttgctgtgaggatgatgaaaaagaactcagccgaaagggactgccccccgtttttgagacaggggtcaaaacaccttttaaacagccaattgccgatagtttatcggtgattggttgtttagtttggtttgaatacgaatattgttataataatgaatgtattctatgacagtgcgttctacgatggcagtcgtagttcgatcaatgctgttaagatagaacgtttcagactttagcgaggaatgaaacgattcgatggaggcattatcagcgggcgtccctttgcgggacatgctcatggtaatgccttttgttttaacagctttttgatactcgtaagatgtatacacagaaccttggtcactatgtaacacgcagttctcaggcagcattggtagctgatcaagtgtgtctaagacaaaggctgtgtcctgcttatccccaatagtaaaagcaatcacttctccattgtataaatctaatatactggaaaggtacaattgtttctgtccataaggcaaatatgtgatgtccgttactagtttttcaagaggacgatcagactgaaagttccgatccaatatattatcgaccacggcatatggctgcccatccttcttgcgctttttcaccttaacccgacactgccattgatttttctgcataatacgttgaaccgttttatggttaatacacattctcttttttagtatggctgtgatttttcgatatccatatcgatacttgtgctctcggcacaacgtgccgatttgtttttccaaatggcgcttgggatgatccttcatcagattcttcttccaacgataataagacgctcgagagatacctaaatgaatacagatatcctgtacggtcattgtgctgtgcaatatttctacaagttcgactgacgtttcgctatcaacttcctttccaattcgttgtacttttttaaaacttcattctgttgtctcaggtaacgaatctctgcctgcagtttctctaaatcggaagaatactccggaccttttccgtaagtgtattgctttccaacaggctgttcgaatcgatgtgtatcaccagccttataccatctaacccatgtctgaacctgtgtcttattcttaatattcaactcctgcaggatctctttcataggtacgcctgccaatctcatttctacagccttctgtttcacttcaaccggataactcactcttgtccccatagaaaaaacacctccaagtctaatttcggataacaatcatccgtattcaaacttgaaggtgtttttatttgtctcatcttatggggtcagtcccgaaaacaggccgggttcttttttgctgttttctctttgagaagcgccgatatgaagtgtccggctttatcccttataaaaaagataccttccatatgacgcctgatcagcattctgccgccaaacatgacaaatgtcatattcggggcatgatggctgctactacaaaagcgtctggcgccccgttatacttgggatcataatgaaaaagaagggacatgacattcatgaccaatcacaccgcaactcaaaaacaagcatctttaaaaaagcaggttgccgcattttccggcgccgatacaaagcatagtgtcaatcagcttttcaacacgtttgtgccgttttttgccctttggtttcttgcttacttcagcctcaatgtctcctatcttctgaccctcgcctttactgttatagcagcgggatttttgacaagaatctttattattttccacgactgctgccaccaatcctttttcaaacaaaagaaactgaaccggctgttcgggtttatttcaggtgtgctgaccctgtttccgttccttcaatggcagcgcagccactccattcatcatgcgacgagcagcaacttagataaacggggcaccggcgatatttggatgatgaccgtcaaggaatacaacgaagcctcagcctggacaaaagtacgctacagactttatcgcaatccgtttattatgtttattctcggcccgatttacgtatttctgattaaaaaccgtttcaatgtaaaaggcgcccgccgcaaggagcgctggaacacctatttcacgaacgcggcgattgtcttattggctgctgcgacgtgcctgcttgtcggctgggaaaactttttgcttgttcagggtccgattttccttatttcggggtcaatcggcgtctggctattttatgttcagcacacgtttgaggattcttattttgaagccgatgagcattgggattatgtgcaggccgcggtagaaggaagctccttttacaagcttccgaagcttttgcaatggctgacaggcaatatcggctaccatcatgttcaccacttaagcccgaaagtgccgaactacaagctggaagccgctcatgaggggcacgagcctttaaaaaacgtgccgaccattacgcttaaaacaagtcttgaatccatgaaattccgtctgtgggatgaggacgaaaagcaatttgtcacctttcgggaggcgcggaaaaaaccggcgccccatccggtaccgaaagaacctttgaagaaaaatgcctgatatggcgcgcggctctttctcttatcagaaagggccttctcttcatgcgtgaggatgcaatgaaggcggtgttttgataaagtgatggtagacacaagcagcagaaggtggaacaaagatgaagaagtattttaaatttcaaaaactgaacgggatttctccttatatatggacgatttttttcatcttgcctttttattttatttttaaaagctcttctacctttgtcatcgtggccggcatcattttcacacttgttttctttggcgcataccgcttcgcatttgttgcaaaaggctggccgctttacttatgggcgcttcttctgatcggcatttcgaccggctcagttatgctgttcagctatatttacttcgccttctttatcgcctacttcatcggccatatccgagacaaagttcctttttacatcttatattacattcatatcatcagtgcggcagttgccgtcaacttcagccttgttctgaaaaaagggtggtttttgacacaaattccgtttatcgtcattacactgatcagtgccatcctgctcccgctcagcattcgaagcagaaaggcacgggagcgccttgaggagaaattagaatatgcaaatgagcgaatcgccgatcttgtgaagctggaagaaaggcagcgcatcgcccgggaccttcacgatacacttggacaaaagctctccttaatcggattgaaaagcgacctcgcccgaaagctgatatataaggaccctgaacaggcccgcactgagctgaaaagcgtgcagcagacggcccgcacctcgttaaatgaggtcagacaaatcgtctcatcgatgaaaggcatccgattgaaggatgagctcggcaatgttcggcaaattcttgaagcggcaggaattgattttgtgtatgaagaaaaagaagcgcccaaacatatctctttgctgaacgaaaacatcgtcagcatgtgcattaaagaagccgtcaccaatgtcgtgaaacacagcggcgccaaagtatgccgcatcaccattcagcagctttggaaagaggttgtcattacggtagaagatgacggcagctttcaatgcaaagaagaccgctttttttcaaaggggcacggcctgcttggaatgagggaacgtcttgaattcgcaaacggcagtttagccattgatacagccgccggaacaaagctgaccatgagaatcccgaatgattcaaaatcaaaagaaaaggatggtagcagatgatcaacatcttcattgccgaggatcagcaaatgctgctcggcgcactcggttcgctgttgaatttagaagaggatatgacggttgtcggtaaaggcacaagcggccaggatgccatcgatttcgtggaaaaacatgcgcccgacatctgtctgatggatatcgaaatgcccgggaaatcaggtcttgaagcggcagaagaactcaaggacagcggtgtgaaaatcatcattttgacgacctttgcccgctccggctattttcagcgggcgctaaaagccggcgtcagcgggtacatgctcaaggacagcccgagcgatgagctcgtcagcgccatccgcagcgtcatgaaaggaagacgcgtctacgcccctgaattaatggaggacatctatagtgaagaaaacccgctgaccgaacgggaaaaagaggtgctcgagcttgtcgcagacgggaaaaacacgaaagaaatcgcaaacgccctcagcatcaaaagcggcacagtccgcaattacgtttcgatgatcctggataaattagaagtgaaaaatcgaattgaagccattacccgatcaaaagaaaagggctggtttaagtaacctgccctcagcttgttcagccagtgtttttgcactggcttgtttctttttcgccgtcactccgtctcttccttccacttcttatcaatcagcatttttcccggccaagtgtatgccatgatgccgccgtctgcggtgatgtcttctcccgtgacgtaagaactgtcgtctgaagcgaggaagagcgcgacggctgccatttcttccggttttccaagccggccgagcggcgtgatccatttgttggcttcacggaacgcctcgcccatttcgtcttctgtcgtgcctgccaatttatcaatgagcggcgtttcaatcgtccccggcgataaggaattgacgcggattccgcttctggcgtaatcaatggccatcgctctcgtcaggttcgtgattccgccttttgcggcgttatagcctgagcggtcaaggtctgcggcccggccggacatggaggaggtgttgatgatggagcctcctttttcgagcatgagcggaatcaggtatttgctgcaaagaaatgtgccgcgcagatcgacggcgatgatccggtcaaacaggtcgaccgggtattcatggacttttccgccctcttggtcaacaccagcattgttaaacagaatatcaattgttccgtactttcgctgaatgctgtccgcaaaagactttacgttttcttcgtctgatacatcaaggtgaaaggcttctgcttctccgccgttttttctgatagcgctgacggtttcattcagttcgctttcattgatgtcaccgcagatcacgcgggcgccttcatcggcgaaaacccgtgccgtcgcttgtccgatgcctgtcgcggcccctgtgatgattgcggttttgtctgttaatcttcccatattgcgattcctcctttttttatatctgttcccgctgaatagggggataaacatacggaggtctgtttctaaatacctattaaatatgttaatattatgtatatacatcattgggaggtttacatattttgaagatacagcataagaaggagatagcgttttattgttatgccattgttcctatgggatttgtgatttacaccgttatctctattctatttcaggacatcatatttcctctcactgtaagaaatgttcttcatgagtctttgcgaaacttgggatctcttatcttatttagtttgtttttctatccgtcatacatatggatgaagaaggaattcggccgccggaaagaagcagagaggagaggatgatcaacattctctcttttttattgataaaatgggtgaaatgaatccattaacatgttaaatttacaatatatgcatctgctaatcctagttgacaattgtcactgtatatgataaatagatgctgaaaagattttacataacatcaaagcataattaaaggagagatctgaagtgcggaaaaaaaagtttaaagcagaatccaagcgattgctggacatgatgattaactccatttacacgcagaaggaaatttttctccgcgagttaatttccaacgcgagcgatgcgattgacaaaatctattacaaggcgttaaccgatgattcattaacgtttgatcaagacaattactacataaaagtgacggcggacaaagaagcgagaacgctcaccgtcacagacaccggtatcgggatgacaaaagacgagcttgaacagcatctcggcacaattgcgaaaagcggttcactcgctttcaagcaagaaaatgactcgaaagacggccatgacattatcggccagttcggcgtcggattttatgcggcgtttatggtggctgataaagtcacggtgaaaagtaaggcgctcggcagtgacgaggcgtatgtatgggagtcggaaggggccgccggctacacgatcgcgccgtgtgacaaggaaaccgtcggtacggaaatcaccctacaaataaaagaaaacacggaagatgaaagctatgatgagtttttagaaaactaccgcatcaaagcgatcgtgaaaaagtactctgattttatccgctacccgatcaaaatggaagagacggtcaacaagccgaaagagggcagcgagaacgaatttgaagaagttcaggaagaacagacggtcaacagcatggtgccgatctggagaaaaaacaaaagcgagctgacagatgaggattacgaggctttttacgccgagaagcattacggctttgataaaccgctgacccatgtgcatatcagcgtcgatggagcggtgcgctacaattcgattttgtttattccggaaaacatgccgtttgactattatacgaaggaattcgaaaaaggattggagctgtattccaacggcgtgctgatcatgaacaaatgcgccgacctgcttccggaccatttcagctttgtaaaaggcatggtggattctgaggatctgtcgctgaacatttccagagagatgctgcagcacgaccgccagctgaagctgattgcgaaaaacatcaataaaaaaatcaaagccgagctgaagagcctgctgaagaacaaaagagaaaaatacgaatctttctatgaatctttcggcagacagctgaaattcggcgtctataatgatttcggcgcgaataaagacgtattaaaagatctgcttctcttctattcatctaaggagaaaaagctcgtcactctggacgaatatgtgtccagaatgcctgaggatcaaaaatatatctattacgcgtccggcgattcatatgagcggattgaaaagctgccgcaaactgaaatggtggcggacaaaggctacgaaattttatatttcacggaagatattgatgaatttgcgatcaaaatgctgacaagctatgaggaaaaagagttcaaatccgtatcaagcgccgacttaggcatcgacagtgatgaggatgaaaagcagactgaagccgaagagaacgaatataaagacctgttcgaaagcatgaaagagattcttgcggataaagtaaagaacgtcagagcgtcgaaacgtttaaaatctcatccggtctgttttgcgacagacggcgaagtgacgatcgaaatggaaaaagtgttgaatgctatgcctgacagccagcaggtcaaagcggaaaaagtgctggaaatcaacccgaatcacgaagtgtttgagacgttaaagaacgcgcacggacaagatcgggaaaagcttgcattatacacaaatcttctctacaatcaggcgcttctgattgaagggctgccgatccatgatccggtcgaatttacgaatgacatttgcaaagttatggtatgacgccaaaaaggaatcgcccagcgggggcgattcctttttttattacagtgtgcgctgtttaagaatttgattttgtttgctgcgcttctttaaggagaaccgttttttcaagtgcgtttcgatttcttctaaacttctgcccttcgtttcaggaacgatgtaagcggcgaagaagaaggatgagaggcaaatgactgagaatattccgaatacccagccgatgcccatggcgctcagcataagcgggaataccagtgaaacgatcaggttggttgccgacagaatcaatgtcgtaaatccggttgcggctccgcgtgcgtttgacgggaacagctccggcatcagaacccatacgacgggaccccatgtcgcctggtagaagacgatatagatgccgagaaacagcacggtcagccatgctgttgaagctgacaggccggccagaaggagaatggctgatagtgacgccaggctcaaggtaatgccgacgcttccccacatcagcagttttttccggccgatccggtcgattaagatcatggcggtgatacacatgatgacgtttaagacaccgatgcccatcgtgccgagaacggacgccgaagtgccgagtccggcctttgtaaagatggtcggcgcatagtaaatcactgtgttgataccgaccgcctgctggaagatggcgaggccgatcccgatcagcagcataggacggatccattttgctttcagcaagccgagcgtagattcttttttctcggcttctccttgtttcatttccgccaattcaacggcgatatcctctttgtcgtgggtcatttccatgacttgtctggcttcctgctcacggccgcgtttgacgagccatctcggagattccggcataaacgcgattccgattaataaaagcgccgccggtactgcggcgagaccgaccatccagcgccaagcttcaaacggggtgaatatgtaattcacgatatatgcgagtaaaattccggttacaatcattaagttattcaatgtgccgagcgttccgcgtatttttgtcggcgccatctcagatagataaacgggaaccagcgccgttgagcccccgacggctaacccgagaatgacacgggagataatcagcatggtgacggtttgcgaagccgcacaggcaagcgcgccgataataaaaatgagtgaaaggacgaaaaccacttttctccggccccatcggtcagagcatgtcccgcttaatgcggacccgaaaatcgcaccgagcagcagcatgctgacgaccaatccctcggtcagcgtgtttaaaggaatatcattgttaataaataacaaagcccctgaaatcacaccggtgtcatagccgtaaagcagcccgcctaatgctccgaaaaagtaaatcaggtattttttggtgtttttcttcacagatgatcctcctcatcttttggaacgcataatagtttatttagataactatttcattccccgaagagaaaaatataaacataaaaaaacacgcccctttaagaggcgtgtttttttcttaggaaaacagcttgtcgataaacgcgatttcttcagcagatagcgtaatggaggctgctttcatgttgtcttttaattgatccgcgcgtttggcgcccggaatcaggatatcgatttcaggtctcgccaagtaccaggcaagcacgatatgcgccgtatcggcattgtgcttttcggcaatcggtttgagctggttgacttttttgatgttttctttaaactgctccccttggaaatgcgcctggtcattgcgcaggtcgccttcagggaaggttgtgttctcgtcgtatttgccggccagcagtccggatacgagcgggaagtacggaatgaatgagatgccgtgttctgtcgtataagggaagaaagtcttttccgcctcacggttcagcaggttgtattctccttgaatcacatcgactaagccgtctttattggcttctttcagctgctccaaagagaaattggatacgccgatggaacggatttttccttcttttttcagctcattcaacgcttgaacggcttcgtccttcggcgtgtgctcatccgggaaatggatgtagaataaatcgatgtaatcagtctgcaggcgtttcaggctgtcttcgaccgattgtttcaaaaaggccggtgaattgtcgaaaacaaagtcatcgccttcttttctgtgagcggcttttgtggcgatgaagacatcctcgcggttgcattctttcagcacctcgccgattaattcttcagaacggcccacaccgtaaatataggcggtatctaacatggtaacgccgcttttaatcgcttcccggaccaattcttttcccgtttcttcattcagattcggatagagattgtgtccgccgaccgcatttgttcccaaaccgatcggaaatacctttaggtcagttttgccgattgttactttgctcatgttttcgccccctgaaaaaattggatatcatagcggctgccggaaaaatacggcagcgttctctattaactataacgctatgccaagtgaatgtcgatttgatgctcttggcaatacttcgtatattcctcatcgagctgctgagaagtgacaatgctgtgaagccggtcgaaaggcgcgtatgtcaaaagcgtggatttgccgaatttggaatgatccgcgagcagatacacttcgttcgccttttcggaaattctctttttcacctcgtattccagtaagtcggaattcgtcaggccgtgggtgatcgttgtcccggtagcggacatgaacgccttgttaatgttgtatttattgagtgtgctcggatcatcaatgccgacaaacgacctagtcttccgtttgtagttattgccgatgatgatcaggtcgatatttttcatggatgaagcggcgttaataatatcaaggctgttcgtcaaaaccgttacattcttatcgggatcaagcgtctccagcatcgatttggtcgtcgtgccggaatcaataaatacaagatcgtgatcctcgataaaccgtgacgcatagcgggcgattttgattttttcatcctgatgttgaatggtgcggttttcaaaagggacgagcacagatttttcggctgacgtcacgccgccgtatacctttttgataacccctttttccgcaagcttattaatatcgcgtctgaccgtgtttttagagacattgaatacctcgcacagctcatccagcgaagtggctccgtgtttgagaatgtattcttccatctcctgaatccgcatcagtttcataaaaaaactccttctagaattcttaaagtaattaaaatatataataaacaccagaagttaatcaatagttacttaacaaatgattaaaaagagagttcacgccgtacgattcgacacggttctccaagttcctgttttcccgatcaaaaaaagtatgataaaaataatgaaaaaattttgattttttagattgacttgaagatgtgttgggcttacaatgtaaccaagaaatgaccaaaacataacctgtaaaatcaaaagtgaaagatgtaaccgtttgctttttccggtacatgaccaacttttacatggaaagattgggagtcaccatcattttagcatttgtaagcgtttaattcatgtcttttatatgtaaaagatgaatatattcatccgttattatccagctgaacaggatgtttactatttaaggaggcaatgagaatggcagagatcagaaaactgaaaaactacatcaatggtgaatgggttgaaagtaagacagatcaatatgaagacgttgccaatccggctacaaaagaagtgatgtgccaggttccgatttctacgcgggaggatgtggaatacgccgtccgctcagcgtcagaggcgtttcaaacatggtcaaagacggcagtgccgcgccgtgcaagaattctatttaactatcagcagcttctccagcagaacaaagaagagcttgcccgtctgatcactttggaaaacggtaaaaacacgacggaagcactcggtgaagtgggacgcggaattgaaaacgtcgaattcgcagcgggcgcgccgtcactcatgatgggcgattcactcgcctccatcgcgacggatgtagaggcggcgaactaccgctatccgatcggggtggtcggcggtatcgcaccgttcaacttcccgatgatggtcccgtgctggatgttcccgatggcaatttcgttaggaaatacgttcattctgaagccatctgagcgcacgccgctgttaacggaaaaactggcagagctgtttgaacaggccggtctgccgaagggcgtcttcaatgtcgtgcacggcgcgcatgacgtcgtaaacggcgttcttgaacatccggatattaaagccatctcattcgtcggttcaaaacctgtcggcgagtatgttttcaaaaaaggcagcgaacatttgaaacgcgtgcaggcgttaacgggcgcgaaaaaccatacgatcgtgctgaatgacgcccaccttgaagatacggtcgcaaacattatcggcgcggcattcggttcggcaggagagcgctgcatggcatgcgcggttgtgacggttgaagaaggaatcgccgatgagtttatttcgaaattacaggaaaaagcagcggacatcaagatcggaaacggactggatgacggcgtgttcttaggcccggtcatccgcgaggacaacaaaaaacgcacgcacagctatattgaaaaaggcatcgaagaaggagcgagacttctttgtgacgggcgtgaaaacgcaacggaagacggctatttcgtcggaccgacgatttttgacaacgtgacgacggatatgacgatctggaaagatgaaatctttgcgcccgttctgtcggtcatccgcgtgaaaaacttaaaagaagcggtggacatcgccaaccagtctgaatttgcgaacggcgcgtgtctgttcacttcaaatgcgaacgcgatccgctacttccgtgagaatattgacgcgggaatgctcggcatcaaccttggcgtcccggcgccgatggcattcttcccgttctctggctggaagtcttctttcttcggcacattgcacgcaaacggaaaagacagcgtcgacttctatacacgtaaaaaagttgtgacggcacgatacccgtctcctgacttcaattgatctgacagccggcccggacggctttgtgattccgtccgggttttcttttaccatccattaaggaggaataaacatgagtcatttgctgcgcaaaccgcaggccgatgagatttctcaaggcgtgaacatcatacatgacgtcacttcagccaattcagacctcaaatacgtcggatttaaagtcgttgacctcactcccggttccacatatacagaggatttgaaaaagacggagtgctgcatcgttgcggtaacgggaaaaatcaccgtcactgattatgatcagacatttgaaagcatcggcacccgtgaaagcgtatttgaaagaaaaccgacggatagcgtttatgtgtccaatgaccgctcttttgaaatcacagcggtcagcggggcgagggtcgcgctgtgctattctccgtccgaacaccagcttccgacaaagctgattaaagcggaagacaacggtgtggaacatcgcggcaagctggcaaacaaacgaaccgttcataatattctccccgattcagatccatcggcaaacagccttctcgttgttgaagtttacacggacagcggcaactggtcgagctacccgcctcataaacatgaccaagacaatctgccggctgaatcctttttagaagaaacctattaccatgaaacggacccgccgcaggggtttgtcttccagcgtgtgtacacggacgaccgctcgattgacgagacgatgaccgcagaaaatgaaaacgttgtcatcgtaccggcgggctatcacccggttggtgttccggacgggtatacctcttactacctgaatgtaatggcgggaccgacacgaaaatggaagtttcataatgatccggcccatgaatggatcctggaacgctaacaagtgaggagtggcagataacgatgaaatatacgtttaatgaagaaaaagagtttgatattgtcgcgatcggacgcgcgtgtattgatttgaacgcggcggaatacaaccggccgatggaagaaacgatgacgttttctaaatatgtcggcggttccccggcaaatattgcgatcggcagcgccaagctcggattaaaagccggttttatcggcaaaatcccggacgatcagcacggcagattcatcgtttcttatatgcagggaaagggcgttgatacgtcacaaatgaccgttgacagagaagggcgcaaagccgggctcgcttttacggaaattctcagtccggaagagtgcagcattctgatgtaccgggatgacgtggcggatttgtatcttgagccgtccgaagtcaatgaaggctacatcgcaaacgcgaaaatgctgctcgtatcaggtacggcgcttgcgaaaagcccgtcgcgcgaagccgtcttaaaagcggtgcatatcgcaaaaaaacatgacgtaaaagtcgtgtttgagctcgactaccgtccgtatacatggcaatcggcagaagaaacagccgtgtactacacgctggtggcggaacaatccggtatcgtcatcggtacgcgtgatgaatttgacgtaatggaaaaccgcagcggcggaaataacgatgaaaccgtccgccatttgtttgcgcactccgctgaccttgtcgtcattaagcacggcattgacggatcatacgcatacagcagatcgggagaagttttccgggcgcatgcctataaaacaaaggtgctgaagaccttcggagcgggtgattcctatgcgtcagccttcatctacggacttgtcagcggccgggatattgaaacggctttaaaatacgggagcgcttccgcttccatcgtcgtcagcaaacacagctcctcagaagcaatgccggctgccggtgaaatcatcgaactgattgaagcgcagcacagtcttaacggtaaatagaacgtataaaaggtgggatcgtttgtgggtaagacaattcgcttaacgacagcacaagcgctgattcaattcttgaaccggcagtacattcatgttgacggaaaagaagagccgttcgttgagggcatcttcacgattttcggccacggaaatgtgttggggatcgggcaggcgcttgagcaggacgccgggcacctgaaagtctatcaaggcaaaaacgaacaaggcatggcgcatgccgcgatggcatacagcaagcagatgctgagaagaaaaatttacgcggtatcgacatcggtcggtccgggtgccgctaacttgacggctgccgcgggtacggcgctggccaatcatattccggtgctgctgcttccggccgatacctttgcgacgaggcagcctgacccggtgcttcagcaggtggagcaggaatacagtgccgccgtcacaacaaacgatgcgttaaagcccgtgtcccgctattgggaccgcatcacccgccccgagcagctgatgagcagcttaatccgggcgtttgaagtgatgacagatccggcaaaagcgggtccggcgacaatctgcatttctcaggatgtagagggagaagcatttgattttgatgaaagcttctttgaaaaacgcgttcattacattgaccggatgcagccgagcgagcgtgagctgaaaggcgccgcggagagaattaaggagagcagccgtcccgtcattttagtgggcggaggcgcgaagtactccggcgcgcgtgaggaattaatcgcgctttctgaaacatacggcattccgcttgtcgaaacgcaggccggcaagtcaacggttgaagccgattttgccaacaatctgggcggcatgggcatcacgggcaccctcgccgcaaacaaagccgcccgtcaggctgatctgatcatcggtgtcggcacacggtacacggactttgcgacatcctcgaaaacggcgtttgattttgacaaagcaaaatttttgaatatcaacgtcagccgcatgcaggcttacaagcttgacgcgtttcaggtcgtagccgatgcgaaagtgacgctcggcaggctgcacggcttattagacggatataaaagtgcattcggcacggcgattaaagattggaaagatgaatggctcgttgaacgggaccggctcggcaaggtcacttttacacgtgacgcgttcgaaccggaaattaaaaaccatttctcacaggatgtgttaaacgagtatgccgacgcgctcgggactgagctgccgcagacaacggcgctgttgaccatcaatgacacgattcctgaagacagcgtcgtcatcagttcggcaggatctcttccgggggatctgcagcggctgtggcattccaatgtcccgaatacgtaccacctcgagtacggctattcctgcatggggtatgaagtatcaggcacgctcggcctcaagctggcccatcccgacaaagaagtctattcactcgtcggcgacggaagctttctgatgctgcactcagagctgattaccgcgcttcaatataacaaaaaaatcaatgtcctgctttttgacaactcgggattcggctgtatcaacaacctgcagatggatcacgggagcagcagttatttctgcgagttccgcacagaggacaatcagattttaaacgttgattacgcgaaggtggcagagggctacggcgctaaaacatacagagccaatacggttgaagaactgaaagcggcgcttgaagatgcgaaaacgcaagacgtatccactttaattgaaatgaaggttctgccgaaaacgatgacggacggctatgacagctggtggcatgtcggcgtggcggaagtgtcggagcaggaaagcgttcagcgggcatacgaagcgaaagagacgaagctgaagtctgcaaagcagtactagaggggaggcatcacgatgggcaaacaagatattctgtggggcatcgctcccattgggtggcgcaatgacgatatgccggaaatcggagccgggaatacgctgcagcatttgttaagcgatattgttgtcgccggctttcaaggtacggaagtgggagggtttttccctgaaccctccgtcctcaataaagagctggctctccgaaacttgcggattgcggggaaatggttcagcagctttatcatacaagacggtattgaaaaaatggctgaacaatttacagaacactgtgattatttgcagaaagtcggagcggatgtcgccatcgtttctgaacagacgtacagcgttcagggcttggacattgatgtatttaaggaaaaaccgcacttctcagatgaagaatgggatatgctgtgccaaggcttgaaccgtctcgggaaaatcgctggcgaatacgggctggacctcacgtttcatcatcatctcggcacaggcgtccagacggcggaagaagttgaccggctgatggatggaacggacccgcggtatgtccatttactttatgataccggccatgcctatatctcggacggagactatatgacgattctcaacaagcatatggatcggatcagacacgttcatttcaaggacgcccggtttgacattatggagcggtgcagacaggaaggcaagtcattcaggcagtcgtttttacagggcatttttacggttcccggcgacggatgcatcgattttaccgaagtataccgaacgctcgtccgtcatgattattcaggctggatcgtcatcgaagccgaacaagacccggcagtcgccaatccgcttgagtacgcgctgattgcaagaaagtacatcgacagtgaactgcttgatcctgcaaattagagggggacttatatgaatagtgccaaggcggaatcagctttcagcaaaaggaccatcgccgcagcattagcaaattacattgatgcaggttccatcgtggcaggatcagcgggtttatctatgtgggtcagctacttgaagctgtccgacagccagatcggattgctcggcgccttcagcgcaaacgcgatatcagcggccatcggagcgctgctcggcgggtatttggctgataaggtcggccgaaaagctgtatacacaaacagtatgctcgtctacgccttaggaatttgtttggttttgtttggatttaactttcccatgctgttatgcggatacatgattatcgggatttctgtaggcgcggatattacggcttcatggaccattatcgcggaaaacgcccctgagaaaaaccgggcgaggcattgcggagtggcgcaggtggcgtgggccgcaggagccgttgtggttctgctgttatccgttttggtcggtgacctcgggcttctaggaaataaaattgtctttgcgcatctattggtgatcgccctgatcacatatgtgataagaaagcgtttacctgagtcggatgcctggaaaaacagtgaagagcggcctgccgccgtgaaaaaaacatcttattttgacctgcttcagccgaaatttttcaagaacattttgtttttaatgggtgtgtttctcgtatggaatctcgccgcgggcgtcatgggattcttcatgccgtacatctaccagcaggtcggcggcgtatccgcaaatacggccaacattctgcagatggccctgtttatcttcaccgggctcggcgtcgcctgtatcttcatgccttttgcagataaatatcggaaaacggtgttcggaatctgcgcatgtatggccgttgtcggctggtcgctgtttttactgccgtttcaggggctcccgatgctgcttttgtttgttttagcgatcggcatcaataacggagccggccagcaggcgaactaccagctgtgggcaagcgagctgttcccgacagaacacagagcgtcagcacaagggctcatgttctttctcgtccgtatttcaatcggaatttggagtttatttgtgccggtcatcatgtcacaattcggcatcggttttatggccggtattctgctcatatgtgtgacggccagtatgatcatcgggcttgtcttcgcgccgaatacgtccggcaagtcgcttgaacagatacaggaggaactgtacggcgctcctcaggacggcagcgggaaaagaaagacgagaaccattatttgattatcagaaggagtggcgatcaatgaatttacgtataggtgttatcggaaccggtgctatcggaaaagagcacatcaaccgcatcacaaataagctgtccggcgcggaaattaccgctgtcacagatgtgaatcaggaggccgcgcagcagaccgttcaggatttcaatttgaacgcctccgtttatcctgatgacgacagccttctcgctgctgaaaatgtggatgccgtcttagtgacaagctggggcccggctcacgagtccagcgttttgaaagcgattcagcacagcaagcacgtgttttgtgaaaagccgcttgcgacaacggcagaaggctgtatgcgcattgtcgaggaagaaatgaagacgggaaaacgattggtgcaggtaggtttcatgcgcaggtatgacagcggttacgttcagctgaaagaagcgattgacaaccgcgtggtcggcgagccgctgatgattcactgtgcgcaccgcaacccgacagtcgcatcgaattattcaacggacatggccgtcatcgatacgctcgttcatgaaattgatgtcctccactggctcgtcaatgacgactatgaatccgtacaggtgatctatccgaagaaatcaaaaaatgcgctgccgcatctgaaagatccgcagatggtcatcatcgaaacaaaaggcggcatcgtcatcaatgccgaaatctacgtgaactgtaaatacggctatgacattcaatgtgaaatcgtcggggaagacggcattatcaagcttccggaaccgtcaagcatcagcttgagaaaagaagggaaattcagcaccgatattctgatggactggcagcgccgatttgtggctgcgtatgatgtggaaattcaagacttcattgattcgatccggaataaaggcgaagtcagcggtccgacggcatgggacggttatattgccgcggtaacaactgacgcgtgcgtaaaagctcaggaatccggacagaaagagcctgtggcgctgcaagagaaaccggcattctaccaatcatttacgactgtgaacaaataatagatcgggagtgaaagaaatgaaactggccttagatccatccatgtaccgcgatgatttaacgttagaagaaatggtctataaaacggcggaactcggatacgaatatatcgaactgtctccgcgcgaggatttttgtcctttctataaatatccgaaagtcgattcagcaaaaatcaaacaattgaagcgccttttaaaagatacaggtgtgaagctgtcctctcttcttccgctttaccactgggcgggtcctgatgaagaccgtcgtcaggccgccgtgcgcaactggaaacgggcgatcgaaattgcggttgaacttgaagtggatttgatgaacagtgaattcagcggttcaaaatatgatccgttgacaagtgaagaaaaatttatcaaatccatggatgaactgctgcccgtctttgaaaaagaaggcgttaaactcaatctgcaggctcacccgtacgattttatcgaaacgcacaaaggggcgatggatatgatccgcgcgcttgacaaggattggatcaatcttgtctactcgactgcgcatacgttcttctatgatgacggaaaaggcgatattgcgaccatgtttgatgaagccggcgaccgcctcacacatgttttatttgcagatacttttaatcataaagcggcgcatggcctgcgctacatcgtcaacccgcctgacgcgaaagtaacggttcaccagcatttggacatcgggcaaggcgaggttgattttgaaacgattttcagaaagatgagagagatgaaattcgacggaattgcgacgaacgccgtttttgcttgggtcggcgaaagagcggatgaatcaagccggaccacgcttaagaaattaaaggaagaattaggtatggcataagctgagtacggagttcggcggagcggggcaaacaagccctccagccggactcccttcatatcgaaaacgcggatgggagaggctgacatgaaactttgctttaatgaagcgactacgctggagaattcaaacctgaaacaggatttagaactgtgcgaaaagcacggctatgattatattgaaatccgcacaatggataagctgccggaatacttaaaagaccattcactggccgatctggcggaatattttcgcacccatcacattaaaccgcttgccctgaacgcactggttttcttcaacaaccgtgatgagaagggctatagggagatcatttcggaattcaaaagcatgatggaaacctgcaggacgctcggcgtgaaatatgtggtggccgtgccgcttgtgacagagcggaaaatcttgaaagaagagatcaaaaagagcagcatagaggtgctgactgagctttcggacatcgcggagccgtacggcgtaaacattgcccttgaatttgtcggccacccgcaatgtacggtcaatacatttgaacaggcgtatgacatcgtgaacgctgtcggccgcgataatgtcggactggtgtttgacagcttccatttccacgcgatgggctccaatattgagagtttgaagcaggcggacggaaagaaaattttcatctatcatatcgacgatacagaagactttccgatcggctttttaacggatgaagaccgcgtctggcctgggcagggtgcgattgacttagacgcccatctgtcagcgttaaaagaaatcggattcaatgatgttgtctccgtagagctgttcagacctgaatattataagctgactgcggaggaaacgatcaaaacggcaaaggaaacaacggaagccgtcgtatcaaaatacttcatgaaggaggcgtgaacatggcttttgtcaccatgaaacatcttcttgcagaagcgaaacgggagcattatgcagtcggccaatttaatatcaacggcctccaatggacgaaggcgattctgcaagcggcgcaaaaggagcaatcgccggtcatcgccgcggcttccgatcgtctggtcgactatttaggcggatttaaaacgatttccgccatggtcggcgcgttaatggaagaaatggcgattaccgttcccgtcgtgctccatcttgatcacggaagcagtgcggaacgctgcagacaggccattgacgccggcttcagctcagtgatgattgacggctcccatcatccgattgatgagaacatcgcgatgacaaaagaagtcgccgattatgcggctaagcacggcgtctcagtagaagcagaagtcggcatggtcggcggcatggaagacgggctggtcggcggggtccgctatgccgatgtcgccgaatgtgagcggatcgtcaaagaaaccaatatcgacgcgctggccgccgccctcggctccgtccacggcaaatatcaaggtgaaccgaatctcggatttaaagaaatggaggctatctcccgcatgactgatattcctctcgttcttcacggagcatccgggattccgcaggaacagatcaaaaaagccatcacgctcggccacgcgaaaatcaatatcaacacggaatgtatggtcgcctggacagaagaaacacgccgcatgtttcagaaaaacggtgatctgtacgaaccgcgcggctacatgacacccggcattgaagccgtggaagagacagtgcgaagcaaaatgagagagttcggatcagccggtaaagccgtaaaacagcaggtcggctgatgagaacggaaaccgccaagatggcggtttttttgtgcggtgttgcgcccgtacgcccgaaacgattatgatgatggcagcagtgtaagaaacgggagtggttcagtttgaataaaatcatgattgtggaagatagtgaagacattcgcggactattgcagaattaccttgaaaaatacggatatcaaaccgtggccgccgcggatttcacggctgttcttgatgtttttttgcgggaaaagcctgatgtggtgctgcttgatatcaatctgccgtcttatgacggctattattggtgccgccagatccgccagcattctacaagcccgatcattttcatctctgccagaagcggggaaatggatcaagtgatggcgattgaaaacggcggagatgattatatcgaaaaaccgttttcctacgatattgtgctggcgaaaatcaaaagccagatccggagggcgtacggagagtacgccgccaagcagggagagaaagtggttgaatatgccggtgtgcagctctttgtagaacggtttgaactgcgctttcaggacgaaaaaagcgagctttctaaaaaagaaagcaagcttttggaagtgctgctggagcggggagaaaaggtgacgggaagagaccggctcatggaaaaaacgtgggacaccgacattttcgtcgatgataatacgcttaacgtgtatatcacgcggctcagaaaaaaactgcgggagctgaatgcgcctgtttccattgaatcggtgcggggcgaaggctaccagctgagggcgctgtcatgaagctgtttctccggtctcatgccgtgctgattctgctttttctccttcaagggctgtttgttttcttttattactggtttgcgggtcttcattctttttcccacctgttttacatattgggcgtgcagcttcttattttggcgggatatcttgcctatcgctggtacaaagaccgcggcgtgtatcattggctcagctcggagcaggaagggacggacatcccgtatctcggttcttcagtgttttgttcagagctgtatgaaaagcagatggagctgacccggatgcagcaccagaagctccatgagaccgaagccaagcttgacgcgcgggtgacgtatatgaaccaatgggtgcaccaagtaaaaacgccgctgtcggtcattaatttaatcattcaggaagaggatgagcccgtctttgaacaaatcaaaaaagaggtccggcagattgaattcgggctggagacgcttctttattcttcaaggctcgacctgtttgagcgggattttaaagttgaagcggtttccttatcagagcttctccaatcggtcattcaaagctataaacgattttttattcaataccgcgtctatccgaaaatggatattcgcgatgatcatcagatttacaccgatgcgaaatggctcaaatttgcgatcggccaagtggtcacaaacgcggtcaagtattcggcaggcaagagtgacagacttgagctgaatgtcttccgcgatgaagacaggacggtgcttgaagtcaaagattacggtgtcggcattccctcgcaagatatcaagcgggtgtttgacccttattacaccggcgaaaacggacggcgtttccaagaatctacgggaatcggccttcatctcgtcaaagaaattacgggcaagcttaatcatacggtggacatcacttcgtcctccggtgaagggacatcggtccgattttcatttcttacaaaaatgtaaggctgcgttaagaaaacaacatagctcgttttgtttccccttgataacatggatttatgtcaaggggatttttatgttaaatgccccggcactacatgaaagcagcccagaccaacaagaataaaatcataaggaggattttcatggcgaatatgcttgaagtcaaacatataaataaaacctataaaggacaagtgtcctatcaagctttaaaacaaatttcgttttcaatagaagaaggcgggttcacggcggtgatgggaccgtccggctccggaaaaacaacgcttttgaatatcatttcaacgatcgaccggccggattcaggcgatatcctgattcacggagaaaacccgcaccggctgaagcggacaaagctcgctcatttccgccgcaagcagctcggatttgtgtttcaggatttcaaccttctggacacactgacaatcggtgaaaatatcatgctgccgttaacgcttgaaaaagaagcgccgtctgtcatggaagaaaaactgcacggcatcgcggcaaagctcggaattgaagacctgctcaacaaacggacgtttgaagtatccggcggacagcgccagcgggccgccatcgcaagagcggtcattcataagccgtcactcattctggccgatgaaccgacgggaaaccttgattccaaagcgtcaaaagacgtcatggaaacgatgcagagcctgaatcaggatgatcatatcacggctttgatggtgacccacgatccggttgcggcaagctactgccgccgcgtcatctttataaaagacggcgaactgtttaatgagatttaccgcggggaaaaccgccaagtcttttatgagcagattcttgatgtgctgtctatgctggggggaaacgcaaatgacctttcttcagttcgcttataaaaacgtcacgagaaacaaaagggcctatcttgctttctttttaagcagcgctttttccgttttgattttctttacctttgcgatgttcctgtttcatccggcactaaaggaaggctacctgaataacatcgccagaaaaggcttaaccgctgcggaatggatgatctttgttttttctttcttatttgttctgtattcggttaacgcatttttgaaatcgagaaataaagaattcggcatcctgctgatgcagggtattacgccggtgcagctgagaaagctcattacggcggaaaacatgatcatcggcgtcatgtcgatcgcagcggggattatcggaggcttcattttttcgaaaacgttctttacggtcggcgcttatattttagaaatggacgcgctgcctctgtacatgccttggaaagcgctcggcattacggccggcggatttctgctcttatttttccttttatcgcagttcacgatcctttttgtcagatcaaatacggtgatcaaattaataaagggcactgacaagatcaagccggagccgaagccgtccgtgcttctgtctatattcggcatcgcctgcctgtgcggcgggtacggcatggttctgaaaggcaatgtccacgggactcaaccgttcatcattttactgcttaccgtcatcggtacgtatttctttttcagccaaagcagcatctggattctgcgcgcgctgaagaagtggaaaaccttttatctgcgcgggaaaaatgtcatttgggtttctgatcttgtttatcgtttaaaagacaacgcccgcctgttctttatcgtcagcattatttccgcggtagcgtttacggcgacgggcgtgctcgcaatgtacaaatcgaccgtcggggcggaagagtccgcttatgagatggagtatgtatcttacagcaataatccaaaagaacagactcatttgaaagatattgaccatgaactgaaaacacacggctttacgtataagaaagacaaaataaatgtttcctatattcgctatcaggaaggagatactgttccgcctgtttacatgatcagcgaatcggaggcggcgaagtacttccatgtcaagctaaacggcctgaaacatggcgaggccgtctatttcccgggcacgtatgaccggaatttcaaaaacgaagcgccggatcagctgaagctgctgaaccaaaaaggcaagccgtctgaccaaaaactgtcggtaaaagaagtcaaaaaaccgctgatctcattgaatgccatcatcgcggtgaacgatcaaacctttgatcagctgaaatcactcggtgagaaagcgtcattatacggctacagctatgatcattggaaagacagtcttgggatcagccaatccttgaaaaatgagatttacggcaactatatcgacgtccattctgattttatggcaaaagccggcacctactatgatacggtgcagctgccgagcctgagtttattcatcggcctgtttatcgcgatcgtcttctttgtcgcggcagcaagtttcttatatttcaggctgttcaccgatttagatgaagacagggagcgctaccgttcattggccaaaatcggcctgagtgagcgtgaaatggcacaaagcgtgacgatacaattggcgattttgttcttcttcccatttgtcattgccgtcatgcatacgctgtttgccttgagaacattggccgtggaaggctattccgatgtagcggggccgctcagtctgaccatcggagggtttttcatttttcagcttctgttcttcctcacagtgcggtcaagctatttgaaaaaaatgaacaagtaaggggagtgcacagatgaaaaaagcattggcaatcctggccgtcttggcggccgctgccgtcatatacggacttctcttttttcataacgatgttacagacagatttaatccgtttattcaccagcaagatgtctatgtgcagattgatcgagatggcaaacatcttagcccgggcggtactgagtatacattagacggatacaacgcatccgggaaaaaagaagaagtgaccttttacgccgcgaaagaccttcggaagaacgcgtatttgaaggtgaaggcgaaaggaaagtatgtcgagacctgggaagaagtcaggtttgaagatatgccgggctccgtacagtcaaaattaaagtgaacaggaaaaacggcacagtgtcatgactgtgccgttttttttattttttattttcttcagcccgtttgatcagcatgtcggtgatgatatccatctgtttgctgacggcaatcgggtcatacggatagaaggtgttgaaatcgttgataaagacacgattgtgttttacggcatcgagatttttccaaacggatgaatctttcagacgctcaaatgttttgctttctccattcggattgtaatcagtaatgaacatataatcagccgcatattgagggatgacctcttgggaaacctgtttcatggcgcctgttttcatgatgttttttttaattttggccggcgctttcaatccgagcgcgttataaacggcttggccgccgcggccggaattgtcattgaaaacccagatctcgcctttatccgtcgtttcataaaggccgactgtctcgtctttgccgatcacgtttttgaggcgcttttgattcgcttcggcttttttgttgaagtctgccataaagcttttggctttatccttcgccccggcaatgtcgccgaataggctgaccgtatctttcgtattctttgcggtgttaaaaggaatgacaatcgtcggtgcgattttcgatagtttctcgtattggtcttccttcatcagcacgattaaatcaggcttcagctgcatcactttctccacattgacgggattgccgatgtcagtaatgtttttcagctgttttttgataaacggatttttgaaagtccatgagcccgccccgacgacatttgcgtcaacggacagcagctcacccgcataaaagtcagtgacgatccgtttcggatgtgcgggtatgtcaatatttccttttgttgattcatatgtacgcatgtctgtctttcctttgcctgatgccgatccgttgttttccttcgcgccgctgcaagcgcttaatgcgaaaacaagcagaagtgccaggccgatcagccatgattgtttcttcataatgatccccctatttaagtgataatgattatcattattaatatagcaggaagacgtcattccgtctatgttttttatagaaaaccttccttgattatccatgttatagtagtaaaggaggaatgaatgttgattacgaaaagagggacttggtgggaagtgctgcacagctggtggctgctgctgactgctgctgacttttgcgctgaccgctttcttggcctttttctatatcggctaccgggctaagaacaaaaaatggctgaaatacggacttatctattttattattttagcaattgcttttgtgctgccgagcacgccgggcgtgtatatcgtgctgcctttatgggtcatctccatcatccacgggctgaaagtgcgggcggcttatttgatacagcttgatgtgtttaaacaaaacgtcgaagcaagagcgtttgaagcggtaaggcatgaggcggaagcaaaattcggcggaaaacccgctcatcgcattgatctgacaaaacagagataaaaacaaatgacaaagccggtatctcgcgctttgtcatttgcatgaccggcctattgctggtatgaatgctgctgaaacggtgtgtgatgctgtgtttgcgggaatgaagaaacattagcgtttgccatcggtgcaggcatgtgtccgcttacttcctgctgaagctgattgcacacattcacgatttgctggcatttctgaatggccgcttcatgcccctgcagcgcttgctgaatggtatgaacggcatgctgttcatggttaagcatctgctgaagcatttgaatgttttgctgttcctgctggagcatttgcttgtactgctgactgctttgctgtgtctgctgaataagctgctgtgctgtttggcggcattgctgcagctgatttccgctgtattggttttgatacatcatgaaaacctcctggagtgattgattttacacatttatcatgtgaaagaataggagaggcattcatgcaagaaaaggattcaaatatttacctgttatatacagagcggaatacaaggctcgggatggcctgtcgagctttgtattccggccctttttctcagaagccgccttctgtagcgtgaaaaggaatattgagtctgttttcgactgcgcgcaggcgctgattcaaacggtttaagcggcgggtatggatttcaatggactggctcagccgtctgatctgctcattcatacgcgtgatttcccggttttggcgctggtcttcttgtgagaggcgggtgagctctctcgtttgctcggcgttttgtctttcaagctgggcgactctccgttctaaacctgtcggctgccgctcttcggactgagggggcgcataataatagctttcctgctgctgatacggctcatactcaacgcggttcacttcgtattcctgctgctgagggaaataggcaggcggggtgtagtactgatatgggttcattcatcattctccttatctagtgaagtctttatacactatgtagtcaattgcacagtgccacggcatccgcctaagttacaggcgtaaaaaagcttcaaaggaaggtgatcatgttgcggaacatacggattttcatcatgacggttcttgttttcggatgcgtcatgataacaggctgctcgcaaaagaaagcagacgatacccctttttattacgggacatgggatgcagggctgaagccgggcccgatggacggggtcagatctgaaaccgtcacgtttacgaaagacagcgtgctgacaaagcaggtcattcaaggccgcggcgaggttgccatgccctcagatgtgtacaaggtgatctcacaaaacacggacgggacgatcgagattgaatacctcggccatccgcaccccgtcaaaagcacgttgaaaagaggaaaaaacggtacgctcatttggaagatatacggagaaacaaaaacaatgacaagaataaaaaccggcggggaggatgcacatgagaaataaggctgccgacagactcgttttgacgggtgtcatcgtacatatcattcaatggttttcactgttatggttattttttatgctttttgatcagttcgggcgttttaccatttacaatcccaatgtcgtcaacggaagcatgcagtctttttcattctttgatatgatgcgcgctcttctgttttccggcacgctgcggaatacgctcctgctgtttctgtttgcggcaatgctcatttacttgtgggtgaacgctctgtttatcctgctggaaatcgtttcttatatcatgatcaggcggaacagccgttcattatgggcatactttcccgcagcgatgggaataaagcttgcccttctggacatagcggccgtccctttctttgcggcggggctgatgctcttgaagcagaaaacagatgacggcggcgaacaagctgacaaggggaaaagacggccccgcatccggaggcaggcccggtatacgaagagaaggcggagaaactcgtccgtttgatttttcattgaaacgaaaaagcgatatgatgaaagcataagaagaaaaggatacaaaggagatgcaggatgtacaagttaatcgcaatagatatggacggaacactactaaacgatcatcatgaagtgacggctgaagtccgcggggcgcttgatgccgccaaagcggaaggggtcaatatcgtcctgtgcacgggccggccgatcggcggcgtgcgtcggtatttggaagagctgaacttacaggaagaaggcgactttgtgattgcctataacggcgcactcgtccaaaatacgtatacaaacggtgtcgtggccgagcagtcattaggttatgaggatttgaagtcgctttacgagctgagcttacagctggatactccgatgcattactttgacacagccaatctgtacacgccgaaccgggatatcagtgaatacacggtatacgaatcatacattacgaaagtgccgcttcatttccgcacgatcgatgaagtgccgaaggatattctgattccgaaagtcatgttcattgacgatccggacaagctggagaaagcgatcgcttccattccggaatcattcaaggaaacatacacaatggtcaaaagcgcgccattcttccatgagattcttcacccgaaagtcagtaaaggaaacgcggtcaagctgctggccgaaaaactcggcattgaacagaaagacgtcatggcaatcggcgataacggcaacgacatgtccatgattcagtgggccggctgcggtgtggcaatggccaatgccatcccggaagtaagggagattgctgattatgaaacgaaatcaaataacgaacacggcgtggcgcatgcgattcaggagcttgtgctgaaaaaataggcaccccatcagagggtgcttttttaccgcgtgttttggtgatatgataagcggagaggggaggcgcgacatggatcgtgaaaaacagcagctcagcatagaagcggcaaaactatattatcaatcagattacagccagcagcagatcgccgaacggcttgatctgtcacgccccaccgtttcaaggctgcttcagtacgcaaaggaaaaagggtatgttcaaattcgcgtcatggacccgtttgaggatctggacgaactcggcgcgaagctggaagaaaaatacgggctgcttgaggcgcacgtcgtcttttctccaagcgacgattaccaggccattacacattacttaagccgctatggcgcagactatatgcataaaaccgtaaaggacggcgatatactcggcgtaagctgggggacgacgatgtaccagatcgcaagccgcatggagccgaagcaggtaaagagcgttgaagtcgtgcagctgaaaggcggcatcagtcattccaatgttaatacgtactcgtcagaaacgattcagctgttcgccgaagcatttcagacgatgccgaggtatttgccgctgccggttatatttgacagcgccgatgtgaaacagatggtcgagcgggacagacatattaagcggatcattgaaatgggcagacaagccaatatcgccctgtttacggtcggaaccgtccgggatgaggcgctgcttttcagactcggctatttccgggaagaagagaaacaattgctgaaagcacgcggagtcggcgatatttgttcgcgcttttttgacgaggaaggcaggatttgcagcagcagcattaacggcaggacgatcggagtcgagctcagcgacttgaaaatgaaagagcgttcgattctggtggcgggcggcagcagaaaatgcaaggccattcacggtgccctgaaaggaaagtacgccaacgttttgattaccgatcagcatacggccaaaaaactcattcaagaattgtgacaattcatgaacataatttcaattaccaatttacatatgttcaaaattcggttattctaaacgtatcctaggaaaaaggaagtgcatacaatgtcaattgcaagtcaaatagaccatactgctttgaaaccgcatacacaaaaagcggatattttacaactgataaaagaagcaaaagaatataaattcgcttccgtttgtgtaaacccgacttgggtcaaactcgcagcggaggaactgaaaggcactggagttgacgtttgcaccgttatcggatttcctctcggcgccacgacatcggaaacaaaagcatttgaaacgaaggatgccatctcaaaaggggcaactgaggttgacatggtcatcaatatcggtgcattaaaagacggcgatgatgaagcggttgaagctgatatccgcgcggtagttgaagcatctgataaaaaagcgctcgtcaaagtgatcatcgaaacatgccttttaacagatgaagaaaaagagcgcgcgtgccgcttggcggtatccgcaggcgcagatttcgtcaaaacgtctaccggtttttctacaggcggggcaacggctgaagatatcgctcttatgagaaaaacagtcggaccggacatcggggtcaaagcatcaggcggcatcagaacaaaagctgatgttgacagcatgatcgctgcgggcgcgagccggatcggcgcaagtgcgggcgtctctatcgtgagcggcggagacagcggcagcagcgactattaatcagcagtgcggaagccgaaagcttccgccatcctctttctttgttgatgcataaaaaattgtaagcgaatacaaataaaaggagaacacatatgaagtatctcatcggaattatcggaatcattgtgtttttaggtcttgcctggcttgccagcaacggcaaaaaaagaatcagaatccggccgatcgccgtcatgctcgtgctgcagctgattctcggttatattctcctcaacaccggtatcgggaattttcttgtcggcggttttgcaaaaggatttaactacttgctggaatatgcatcagaagggattaactttgtattcggcgggcttgtgaatgcgaaacagacgacgttcttcatgagcgtgcttctgccgatcgtctttatatccgctttaatcggaattctgcagcattggaaggtcctccccttcatcacgaagtatatcggtcttgcgttaagcaaggtgaacggaatggggaaaatcgaatcttacaacgctgtcgcatccgcgattttagggcaatcagaagtctttatcagtttgaaaaaacagctcggttatcttactgaacagcgcttatatacgctttgcgcgtccgcaatgtcgacggtctcaatgtcgatcgtcggttcttacatgatgatgctgaagcccgaatacgtcgtgacggcgcttgtgctgaacttattcggcggatttatcatcgcttctatcatcaacccgtacactgtcagcaaagaagaggatttgatcgtcgttcctgaagaagaaaagcaatccttttttgaagtgctcggtgagtatataatggatggattcagagtcgccgtcgtcgtagcggcgatgctgatcggatttgtcgcactcattgccctggtcaacggcgtttttaatgcggtcttcggcattacattccaggcgctgctcggatatgtattcgcgccgtttgcgtttttaaccggtattccgtggaatgaagcggtgagcgccggaagcattatggcgacgaaaatggtatcgaatgaatttgtggcgatgcagacactctcatccggcgatttccatttcagtgcgcatacacaggcagtggtatctgtattccttgtctcattcgcgaatttctcctctatcggaatcattaccggtgcggtgaaagggctgcatgaaaaacaaggaaacgtcgtcgcgcggttcgggctgaagctgctgtacggcgcaacgctcgtcagcttcctgacagcggcgatcgtcggattgattcactgaacataaatgaaggacaggtgatagatcatgagaatggtagatcttattgtaaaaaaacaaaatggaaaagaacttacaacagaagaaattcaatttttcgtaaaaggatacacggacggaagcatccctgattatcaggcaagcgcgctggctatggcgatttactttcaggatatgacggatcaggagcgcgccgatctgacaatggcgatggtgaattcaggagaaacgattgatctctccgccattgaaggcattaaggtcgacaagcactctacgggcggggtcggcgacacgacaactctcgtactcgcaccgctcgtcgcggcgctcggcgttcccgttgctaaaatgtccggccgcggtctcggccatacggggggaaccattgataagctggaagcgatcgaaggcttccacgtggaattatcaaaagatgaattcatcaagcttgtgaaccgcgacaaggtagccgtcatcggacaaagcggcaatttgacgcctgccgataaaaagctgtatgcgctgcgtgatgtaacgggtacggtgaactccatcccgctgatcgcaagctcaattatgagtaaaaaaattgccgccggagcagatgccatcgtgcttgacgtcaaaacgggcgcgggcgcgtttatgaaaacggatgaagacgccgtgaacctcgccaaagcaatggtccgcatcggaaacaacgtcggccgccagacgatggccgtgatttctgacatgtcgcagccgctcggttttgcgatcgggaatgccctggaagtacaagaagccattgatacattaagaggggaaggccctgaagacttaaacgaactcgttctcacgctcggcagccaaatggtcgtattggcgaaaaaagctgagacattggaagaagcgagaacgaagctgcaggaagtcatgaaaaacggcaaagcgcttgaaaagttcaaagagttcctaagcaatcagggaggagacgcttctgtcgttgacgatccgtccaaacttccgcaggcggcgtacaaaattgacgttccggcaaaagaagcgggtgtcgtttcagaaatcgtcgctgacgaaatcggcgtcgcagcgatgctgttgggcgcgggacgtgcgacaaaagaggacgaaatcgatcttgccgtcggcattatgctccgcaaaaaagtcggtgacaacgtcgaaaaaggcgagccgctcgtcaccctttacgccaaccgcgaaaacgttgacgacgtgaccgccaaagtctatgacaacatccgcatctcagaaaaagcggaagcgccgaaactgattcatacgctgattacggaataagagaagaaaggcacatacctcatcagtatgtgcctttttttatggcatggttttatccaaatgaatgtcacggacggattgtttcggctgtttctttctcaaaaaacgaatgagatagcacaggatcatacaaggaattccgcagaagagggcgattctttgattgggatcaaatgcaaggcctacgcatgaagcgaaacataagatcacagcggcgatcggaacgagagggtataacggtgtgcggaaggtcagatccgagacgcgtccgccgtttttcacataatgttttcgaaataacagctgagacagggcgatgctcatccacaccacgacgccggcaaatccggctattgccacgagcaccacgtagaccgtgcccggggcggcgatgcttgagatcaaggatatgcaggaaacggccatgctggcgagcagagcattcagcggaatgcctttcggcgtgacttttttgaaccgggcgctgatcatgttttcattcgcaagagaccacagcatccgggtggaagcatacagtccggagttggcgaccgaaagcaaagccgttaaaatcacgaagttcatgatatctgcggcgtatgggataccgatttgggaaaagaccgcgacaaacggactttcaatcacaccggcttccttccaggagatcagtccggacagcacaaaaatggcgccgataaaaaagatgaccgttctccaggcgacatttcggatcgaacgcggaatatcttttgccggattggcggtttcacccgcggtaattccgatcagctccgtccctgaaaaggcgaagcttacggaaatcattgcgatgaaaaccgcaagaaagccgttcggaaacagcccgccgtgtgaggtgaaattcgacagcatcggagcttcacccgaaccgtgcaatgaaatcaaaccgaacatcgcggcgccgcctaagatgataaataaaaggatggtaacgattttgacgcttgaaaaccaaaactccgtttctgcaaacaatttaacggagaatgcattggcggcaaaaaggagagccgcgaaaatcgcgctccacatccagacgctgctgtggggaaaccagcgctgcatgaggataccggaagctgtaaactccgatcctaccgtcaccacccaattcacccaatacatgataccgaccataaagcccgtggacggcccgataaacgttgtcgcatacgtttgaaatgaaccggtcacaggcatggctactgacaattctccgagacactgcatgacaagatacatcatcaagccgccgatcaggtaagcggcgatcgtcccgcccggcccggcctggctcaatgtataccctgtgctcaaaaacagccccgtgccgatgacccctcccaatgaaatcataaataagtgcctgcttttcatcgtgcgctttagctgattgccgccttgatcaacatccatcgtgatctccccctttttgcgtggcgtgagaatcttccggcagccgagagcacgcgtgccggatttgattttaacgtgacaatttaaatccctttaatgcatgtaaaatgacgtgtgcggctgcccggcttgtcatatcgcgaaaatcaagtgtcggatcaacctcaacgatctcaatacccgagatgtcagcctcctgggctaaaaacctgaccgcctgaagcagttcctcggtatacagacctccggggccgatcgcgggacagccgggcgcatgagcttgatccagcacatccatatcaaccgaaataaaaatggcgtcggctcttttttgaacggccggcaagacctcttgtatcgttcggaggagccctttctcccggatcatctccattgtatgcacgtctgcctgccgttcttttacatattgttcgtatgccaagctgttgctgaactccctgatcccaagctgaatcaggttttgtccgcttatgatattttcatctaacagccggcggaatggcgtgccgtttgtcggtcctccgtcttctgtgttgcggacgtcgtggtgggcgtcgaattgaaagacggctgttgttcctttcgtttccgcaatggctttaatggtggaataactaatggagttgtcgccgccgagaatgacgggcacccagtcaggctggtccgtcagaatgtcatgaatggtccgataaatgtgttcgtgagatgtgacgacatccgtgacgtgaatctgaatatcgccgatatcgtaaagatggtcaatgacatgctcccgcagctccgcggaataagcggaaatcccgccgagcgcccggcggatcgcaccgggtgcaaagcaggcgccggaatggctgattgacgacttagaaagcggaacgccgatcaaagccggccctttgatcgtttgtcccgcccacgcttccgtcacatcgccgatccttgtcacatggcggtcgttgaagagggagccggctttttgcagaaacggatacttatccaagagcggctccctcccttgagacaaccgtctttccattcttgatgacacggcggacatgattgacgccgtaatgatacgggatatacatgtaattcggcgcttcccaaatgacaatgtcagccgcccgtccggctttaatttgtccggcctcttcgccttttccgatcgcatacgcggcattaacggtgacagcgtgccagatttcttccgcggtcatttttaaatgaagcgcggcaatcgacataatgagctggagattttccgtcggtgagctgcccgggttgaagtcagtcgccaaactgacccgtacgcccgcatcaatcatctcccgggctctcgcataagtgtgtttgccgagatagaaagtcgtgcccggcagcaggacggcgatcgttccggacgccgctagcttttcgatgccttcgtcagacgcccccaccaaatgatcggcagaaacagcatgcagctctgccgccaattccgcgccgccgagcgggtcaatctcatcagcatggattttcaggccgaaaccagcttcagacgcctttttcaggtagtcccgtgactggctgacggtaaagacgcctgtttctgtgaatatatcggcaaattgcgcgaggcctttttcttttatttcaggcaaaagctgcagcatgcgattcagaaattcgtcagggctgttccggtactcaggcggaatggcgtgtgcccccataaaagttgtgacaaggtcgaccggctggcgttcgcccagtttcttcgccgcggtcagctgtttcagttccgtgtctttgtcgagtccgtacccgctttttacttctgccgtcgtgatgccgtataacagcatgcgtccgaggtgaaaaagccctttttcaatcagttcttcttcggaagcggctttcgtgtctttgaccgttgacaaaataccgccgccttgcgccaaaatatccaaataggacatgccctgaatttttaaattcagttctttttcccgggaccctccgaatacaagatgggtatggggatcgacgaggccgggggtgacgagccgtcccccgcagtcgatgatgtctcttgcctcgtatccttcctccgctccttgatgtccggcaaaaacaatgcgcccgtcgtgaatgccgatgacggcatcttccgtgacatgaagatcctgcatgcttccgcctgatcgggggccgccggattccatcgtcagcagctggccgatgttggtgagtatggtatctatttgtttcggcatgttaccgctcctttttcatcggtatcataatgtcttgttcctcggcgacttgagccgctttttcataacctgcgtccgcatggcggatgatgcccattcccggatcgcttgtcagaacgcgggaaagccgctgttccgcaaggatgctgccgtcagcgaccgcgaccattcccgcgtgaagggaataccccatgccgacgcccccgccgtggtgaaaagaaacccagcttgcgcctgaggccgtgttgatcagcgcgttcagcaccgcccaatcgccgaccgcgtcgcttccgtctttcatcgcttctgtttcccgattcggagaggcgacagatccgcagtctaaatggtctcttccgatgacgatcggggctttcagctcgccgtttctgaccaattcattgatggcgagccccatcttttcccgttcaccgtagccgagccagcaaatacgggacggcaggccttggaatgtgacttttttctgtgccatgtcaatccagcggtgaagggcttgattttctggaaacagctcttttaataaagcgtccgtgcggtatatatcttcagggtctcccgacagcgcggcccagcggaacggcccttttccttcacaaaataaaggccggatgtaggcgggaacgaatcccggaaaatcaaaagcatcggcgagaccctcatctttggcagcctggcggatattgttgccgtaatcaaagacgacggcaccttttttcttgaaggcgagcatggcttccacatgctttttcatactctgcttggaaagccttacgtataattcaggctgatcccggcgcaggcggtcggcctcttcaagtgagtatcctgccggaatatagccgatcagcgggtcgtgagcggaagtctgatcggtcacgatgtcaatatggaccccgcggttcaaaagctcatgatgcacctcagccgcattgccgagaaggccgatcgataaaggctctccggcttgtctggctgcttcggcccagcgcagcgcttcgtcaattgatgctgttttacggtcgcaatagtttgtttcaatgcgtttatcaatccgtgtttcatccgcttcaacggcgatgacgacgccatcattcattgtgacggacagcggctgggcgcctcccattccgccaagtccggccgtcagcgtaagggttcctttcagactgccgccgaaatgctgtctcgcaagctccgcaaaggtttcataggtgccttgcaaaataccttgtgagccgatataaatccagctgccagccgtcatctgcccgtacatcatcagcccttttttctcaaggtcatggaaatgctcccaatccgcccatttcggcacgagaaccgaattagccagcaggacgcggggcgcgcggctgtgcgtgcggaacaatccgacaggttttccggattggatcagcagtgtttcatcatcttttaacattttgagggaacgctcaatcgcgtgaaaagcatcccagtttcgtgcggccttgcctatgccgccgtatacgatcaaatcctccggcttttcggcaacctccgggtcaaggttgtttcggagcatgcggagcacggcttcctgctcccatcctaagcattcaagttcggtgccgcggccggcgcggattgatttctttacatcagtcatcttgtaagtcccccttcattggtcatcagtttttggtgatgctcattcggcagaaaagactccttcttcagccagtcactcagatgctcgatgtcataagaaaacacgcggtcttcttgtatggacggcacgatgtttctcatttcgtgatagagctgttttgtgtacgaggcgcaatgttccgcaccccggtactccacggcctgcagcgcgcaaatggcttcaacggcaagcacccgtctcgtattcgcaatgatctggtaggcgtgccttgaggcgatggttcccatgctgacgtgatcctcctggtttgccgatgaaggaatggaatcgacactggcgggatgggccagggttttattttctgacacgagggaggccgccgcatattgcatgatcatcgctccggattgtaagccgggctgcgggctcagaaagggcggcaggtcattcagctgcggattcacaagccgttcgatccggcgttcagaaatattcgcaagctcggccgccgccactttgagaaaatccatggcaaaggcgatcggctgtccgtgaaagtttccgcctgagatgattttggcgccgtcttcgaaaatgagcgggttatctgtcgcggcattcatctcaatttctaatttttcttttacataggctaatgtctgccatgatgcgccgtggacttgaggaatacagcggatcgaataggcgtcctggacacgcagctccccttggacggtcgtcagcttgctgtctgacaagtaatagcggattcgctctgcgacatccatctgttcctgataaccgcgggcggcatgaatgtcctcgtcaaacgcatcgataatgccctgaaggccttcgatcgttaagctcgcaatccgttccgactgataggccagcttttcggcttcgaggtaagcgatcagccccatcgcggtcatggcctgcgttccgttgatcagcgcgagtccttccttagaggtcaggacggccggctgaagggttgtctgttctaaagcatgagctgtcggcatccgggccccttcgtaaaagacttcgccttgaccgataagcgccagtgcgagatgagaaagcggcgccaaatccccgctcgcccccagtgacccttgctgcgggatgaccgggtgaatgcgatgattgagatacgcgagcagttgatcaatcagctcagtccgcacgccggaaaagcctttcagcagggcattggcgcgcaaaagcagcatggcccgcgatacagattccggaaacggatcaccgacgccgcacgcgtgagaaagaatcagattcagctgcagatccgcggcgtcttctttttgaatcagcacatcgctgaacttgccgaatcccgtcgtaatcccgtaaatggtcttctcctcttgaacgatccgttcaaccgccgccctgctttttttcacacgttccatgctttcggcagatgcttgaacctcttcaaaatcaaacagcacacgctgggcatctgcggttgtcagtgaggaaccgtctaacgtcaccatcatttcaaccccttttcctttactttgataaagcgcccatacaaaaaggagctatgccatgaaaatgatatttcacgcatagccccctatcatctgaaatctatgggctgattcatatgtgattaattccgactccgaatgtttcgtgctcaagccccttaatcggagctccgatcgtgccgtaaagtgaaacggcgatccaatcgccttccgcctcgctttcatacggatttccccgcaagacggcaaacttcaggcccacggtacgaagcagcgagccaagcagcatttcgcccctcgtcactccgtgcaaagcttccattgtagcgtgatacagcgcatgtgattcgcgataaccctcagattgaatgacgccgctctttttggaagcggtttcaattgcagctaccaccttatgcgcatccattgaacccaccctgccgagacagactttccagccgtcccgttccagccgtctgatctgctggttttcttcagtctcatgaagcagaagaaggacggataagcgcccgatgcggcggtctttgtgtaaggtcatatatgcttcactcaattcttaaatattctgataactagtaactgttttttatattaagtgtttgcgaatcagaagtcaaaactttttttccagtctttcacaaatcagattgttatcgaagtaaagcggtacatcgcgaagccggcgctgttgatcacatatttccgccatccgcgtcataaaatggagcgttgtcttgaaagcgttttaagaaaagaagagagcgaggagatttcagaaaatgaaaaccagtttctttcgtgtgtgcctggtctcagcagcggtcatcggattcactctgccgcaggcaaaagcccagcatccggttttttcagaggtcagcgtgcatgatccgtccgtcatcaaaacaggagatacatattatgtattcggctcgcatttggcttccgccaagtcgaaaaacctgatgcagtggcagcagatgtcttcaagcgtcaatcccaataatcccctgatcccgaacgtctacaccgaattaaaagagacattcgactgggcccagtctgatacgttgtgggcgccggatgtcgcccagctggctgacgggaaatattacatgtactataacgcctgtaaaggagactcgccgcgatccgctctcggtgtcgccgtgagtgacaaaatcgaaggaccctacaagaacaaaggcatctttttgaaatcgggcatggaaggaaaaagcgaagacggcacgacgtatcatgcaaacgttcacccgaacgtcgtagatccgcaaacgttttttgaccataaaggcaagctctggatggtgtacggctcttactccggcggaattttcatactggaaatgaatccgaaaaccggtttcccgctcccgaaccaaggctacggaaaaaaacttctcggcggaaatcacagcagaatcgaaggcccgtacatcagctacaatccggaaacgaaatattactatctgtatctgtcattcggcggacttgacgcagccggcggttatcatatgcgtgtggcgcgctctaaaaatccggacggtccgtactatgacgccgcaggccataacatgcttgatgccaaaggaaaagacggcagtttcttcgacgacaaagcaattgaaccgtacggggtcaaactcatgggcggctacagcttcgcctcacaatctgaaaaaggcacgggctacgtatcgccgggacacaactccgtgttttacgacgggaaaacgaaacgatcatacctcattttccacacccgtttcccgaacagaggcgaagagcacgaagtcagagtacatcggctgtacatgaacaaagacggatggcccgttgcagcgccataccgctacgcgggagaaccggatacacagatatcggcatccgccgcatccggagcctacaaactcatccagcacggaaaagacattacagctacgatcaaaaccccaaaaaatatccggcttaacaacgacggcaccatttccggggaaatgaccggaacctggacaaaaacggacagcagcaaagcccgaatcaacctgaacggcacaaattatgacggcgtcttcctgaaagaatgggactcagcgagagagaaagaagttgtgacgtttagtgtgctgagcggtgatggggaggctgtttggggagtgaagtaaattagcacctactccattttggagggtgcttttttcttgctaattaggagaatgaccttctattgcttttaataaaccatttgaattatgatggattcaacctctatcgtttacagtgaacagtataaaattgaaaaatttgaatacatacctaagaaaaaacgaaaggaagtttaattttgaaagaaacaataaaagtagccgccgcagtcatacaaaatgaaaacaatgaaattctatgtgctctacgttctccaacaatgtctctgcctaatctgtgggagtttcctggtggaaagcttgaagaaggggagaatgcacgagaagcacttgtaagagaaattgaagaggaacttgactgtaaaattgttgcgggcgatgtaatagccgatattcatcatgaatatgagaaggtcatcgtcaatttaatttcaataaaagcgaagattgtatcaggggagccggtagcaaaagagcatgcggaattcagatgggtgcctatacgtgagctagaatcactagagtgggcacccgctgatcttccgaccgtatctgccttaattcgttaaatccacatacaagttttctgggacaggctgatggagcttccatttgacattcattggcttgtctccgtggcttgatacgtaatccgcttctcctacataaataaatggtaaagtgatgttgtgcatttcagtgaatttcctcacaaataaatgaatatggtatcctttttccttatggtgaataaagttttgccctacgcttgatgtatgtgaggtttggttttgactttgccagtgaaaatggctaggatcaataaaataatctttatatagcaaatgatcttctactttttctgacttattcaaattgataaagattaaatagtgatttttaactctacgtacaccctctcgccaagtcccttcctgatcagttgactgaaaaagataaatgagctcatttcttgtataggtttgatacattgtaagcttaatctcttttgaagcaagggcgtctatattgttcatacgtctaaattcaatcattccatagtggacgcgctccttaatatacggtccgaataatggatcgtttaatatctcgctcacttctggatctaacttgaatgtatcaccttgtaatgtaccaaagcgccaattctgtttttgatctgatttcgttaaacgctccattgctcgctgaatgaggtcatcatgtgtatctgttgtgatttgaatatgaaactgtttttctaacgattcttttacatcttctattgtgatgatatttttgtgaaaaccgctctgtaaaattaaccattcataaggccatttaataggtaattgctgttctaattttgctactatccctacaaccaaggggttattgagaattccttcatctgtaacattcaaatcgtccattttctttttggtctgtacccacgatttgtatttctttataaaaaaggtaagcccaggtgcctgttcagagtatagaaaatcaattaattctggagagcgtcctagctcttgtttaaattgcttgtataacgttttcagcatggcatctgaatttagtttaatatgatcgatcttatttaaaatttctttcttcgttacggctgaaaggtcaacataagatcccccaggtaaatctgaaaactcatgcgtcacggccactcggagggaatctttatcaaacgatttttggcttgtttgtccagatagtgcgagtggaataacaaatgacttttgatagtttccgataaaatccagtatcgttacaaactctttgtcgtctgtttttctaagcccccgtcctaattgctgaatgaaaatcgttggtgattctgttggtctaaggaacaatagtagattgagttttggaatatctattccttcgttgaaaatatctactgtaaatataagttctaaactgtggtgcgggtcctccaaatgacgaatgacctcttgtctttttgcaggagaatcatttcctgttaagtaagttgtataaaatcccaatttattaaattcatcactcatgtatattgcgtgttcgacgtttgtacagaaacctaagccaaccattttctcgccgtggaatccatacatgttgatcatcttaatgatatattctactcgtttatgagtttttaaatgatctactagcgatttctcttcgtacagtccatttttcacttttactttttcgtaatctacagtatgatctgaaattccaaaatagtgaaatggtgcaagtagctctgcctttagagcatcgcggagtctaatttcataaacaacattatgatcacaaatctgaagcacatctttaccgtcaagacgctctggtgttgcagttaaacctaataaaaactttggtgtaaagtagtttaatacagcttgataggtagatgcttctgcatggtggaattcatcaatcacaatgtagtcaaattcatctgttgaaaaggattccaatgtttcttttttatgtagcgtttgtacagtgctaaataaaaaacgcttatctctttcttttttcgttccactcaataaaccaaaatcttcatgattattggtgactttctggaatgtttcgattgcttttgtaagtaactcttcccggtgggcaagaaaaagatatttatttggtttaaattgctcaaaatcaaatgctgctaaaaatgtttttccggttccagtggcggcgatgatgactgcttttgtctccccttcgtttcttgtttttttaaggtttcgtaacgcttccttttgcatggcattcggggacattttcgttttgtaaagagagttttgagcagcaaaggaagcacttaccttttggcttcctgcttggaattcctcataggcttgtaaaaattgttcgtcaacaggctgtgtcttttcattccaaacagtgtcaaacaaatcttttgtttgttgataaacggggagatatctggtttcaggtagtctaacatttaactcatacccggtcgtaagtgcagcttgtgatagatttgaagatcctacaatgacactatgctgtccagaacagcgttcaaataagtatgctttcgtatggaaagattttttatattcatttacaattttcaactcaacattttcaaattgaagaagatgtcttaacgctttcggttctgtaatacccatataggtagatgtaatgatgcgtacagggacatgtcttttagcaagctcctgaagcggagggatcaaaagctgaacaccagaccaccttgtaaaactaaccataaagtctacccgatccgccgttaacatctcgtgttttaatgctttgaaaaagttatcatgagtttgatgatttcctagcagtttcagacgatgtagagagaattcctctgaaataggaagttccatttcgtttaaactataaagcactgtggaaagtggtaatgaaaaattcgtatgttgtccaagctgagaggcaactttctcgctcagctgaatcgcttgttcatattgatcttgatccacaagtgtttgaaatgtctcgctcagttgttttgccgtatgtaaagtcaaaacctctgcatattctttagggccaaccggttgaatgcgatgtgatgttggataaagtttttgttgttgctgaatttcctcatggaagcctctatgatttctcatcataatctccttttttatatcaataattccattttatcactactcttaccaataggtaatactaaaaaagaagagaataaagtcctatttattaagcgtttaaaaaataacgctgaggtagtttggtggagtatggagtattcttacattgaaaatggggttactgttgaggtaatgggcttgaattgactgcatgatctagtatttgctcttatcaactggaagtaggtactactttaaccgttgtggacaaactagagaagtgtgaaattaaagtagagaagaggaattagggcgcaatttaacttaaagctactttatcagaggtacttaacatgagggttcttttagttaatatagtagatgggaacaatattttaatgcctttatatatttgactagtatatttttaaaaatgtaagcgttgatacccaataaatccagtgctaaagtatacatatcaacccaatatcattcacctaggattgttactgcaaatcgcaggcaaaacctaaattgcgtcagacaggggaagacccccgtgtgctgtgcagtttgggttttttttatacccttttttcggaggtgatgctgatttcataacaaaaaaagccggagaaaggcgggcacctttcgtccggcggttcccccatttttaaggaggtatactcatggactatcataaaatatcaaaagagattttacaacttgtcggcggggaggagaatgttcagagtgtcatccattgcatgacgcggcttcgttttaatctatatgacaatgcgaaagcagatcggagcgggctggaacagacggaaggcgtgatggggacaaatattagcggcgggcaatttcagatcattatcggcaatcatgtgccgaaggtgtatcaggctttgatggaaagcagcgggctcagtgatgaaagcgcaaacaaaacttcaaagcagaagaaaaatgtgctgagcgccgtgtttgatgtgatttccggcgtgtttacaccgattctgccggccattgccggagccggcatgataaaagggcttgtcgcgctagcggtgacattcggctggatgtcggagaagagcgagactcacagcattctcacggctttcggtgacggtgcgttttattttctgccgcttttgcttgcggtaagcgcggcgagaaaattcagatgtaatccgtacgtggcggccgctgtggcgggtgcgattctgcatccggatttaacggccctgcttggagcagggaaaagcatctcctttatcggtcttcctgtaaccgctgccacgtattcatcgacagttatcccaattttgctggcgatatggctgatgtcctatgtagagaaaggaattgaccgaatcacgccttcatctttgaaattgattgccgttccgatgcttacgcttgtgatcgtcgtgcctgtcaccttgatcacagtcggcccgctcggcgcgattctcgggaattacctgtctgtcggcgttaatgatttgttcaatcatgcgggcattgccgcgatgattctgcttgcaggcacattttcgctcatcattatgacggggatgcattatgcgcttgtgccgatcatgatcaataacatcgcccaaaacggacatgattacattctgcctgcgatgtttttggcgaatatggggcaggccggcgcgtcatttgcggttttcttaaaatccaaaaacaaaaccttcaaatcgctggcgtttacgacgggcattacggcattgatgggcattaccgaacccgcgatgtacggcgttaacatgagattgaaaaaaccgttcgcggcagcattaatcggcggcgcggcaggcggagctttttacggtgtaacgggcgtcgcttcttacattgtcggcggaaacgccggtctgccgagcattccggtctttatcgggccgacgtttctttacgcgctgatcgggctttttatctcgtttgcggcgggtatggcggcggcacttctgatcgggtttgaggatgtacagtctgaacgggacaaagcatctgaaacgccgggtgtgacggcaggcggagaaatcattcacagcccgattaaaggcgaagtgaaagcattaagcgaagtgaacgacagcgtcttttccggtggaatgatgggaaaaggttttgcgattctgcctgaagagggcgcagcggtttctcccgtagaagggagggtgacagccgtatttaaaacaaagcacgccatcggcattacgagcacccggggagccgaggttctcattcatatcgggcttgataccgtccggctggatggcaggcattttgagatgcacgtcaaagaaggcgatactgtcgcgccgggagatctgctgattacttttgatatcgacgagataaaggctgccggttttgacgtgatcacgccggtcatcattacgaatacggatcaatattcatttacagacgtgaaaaaaagcggaatggtcaaaccgaacgaagcgcttctggcgttatcctgaaaaagaggtggagaaaacatgaagagatttccggaaggttttttatggggcggcgcaacggctgccaatcagattgaaggagcttataaagaaggaggcaaaggactttctacggcggatgtctccccggacggcattatgtctccgtttcatgagacggacgatgcgctgaatttgtatcacgacgcgattgatttttatcaccgctatcaagaggatatcgccctgtttgcggagatgggctttaaagcgttccgcacctccattgcgtggacgagaatctttccgaacggcgatgaaacagaaccgaatgaagaagggctgcaattttacgaccgtttgtttgacgaattgagaaaacatcagatcgaaccggttgtcacgatttctcactatgagatgccgctcggtcttgtgaaaaactacggcggctggagaaaccgccaaacggtcgatttctatgagcggtacgcccgcacggttttcacccgttataaagacaaggtgaaatattggatgaccttcaatgagatcaacgtcgttcttcacgctccgtttacaggcggcggccttatattccgggaaggcgaaaataaacaaaacacgatgtaccaagcggcccaccatcaatttgtggcgagcgcgctggcggtaaaagccggtcatgagatcattccggattcacagatcggctgcatgatcgccgcgacgacgacgtatccgatgacgccgaagccggaggatgtatatgcggctttgcaaaaagagcggagcacgctgttcttttctgatgtacaggcgaggggcagctatccgggctatatgaaacgcttctttaaagaaaacggaattacgatcgagatgaaggaaggagacgaggcgctcctgaaagaacatacggtggattacatcggcttcagctactacatgtcgatgacggccagcacggcgcctgaggatctggcgcaatctaagggaaatcttctcggcggcgtgaaaaacccgtacctgaaatcttccgaatggggctggcagattgatccgaagggcttgcgcatcaccttaaacacgctgtacgaccgttatcagaaaccgctcttcatcgtcgaaaacggactcggcgcggttgatcagccggaggaggacggaaccattcaggatgactaccgcatcaattatctgcgtgatcatttaatagaggcaagagaggcgattgaagacggcgtcgacctgatcggctacacgtcgtgggggccgattgacctcgtcagcgcctcaacggcagaaatgaaaaaacgctacggctatatctatgtcgaccgcggcaatgacggaaaaggcacgtttgaaagaaagaaaaagaaaagtttttattggtttaaagacgtcatcgccacaaacggagaaagtctgtaagcgcaatgttccggagaaagccggcaaaattgacattcagcaaagagaggaggacaataaaagcagaaaggcgggattcatatgtttaaaaaaattcttgcagcagtagacggttcagacatgagcaataaagccctggacgcagccatccatctggcgaaagaacagcaggctgaactcaccattctctatgcgggacgtgaagccgttgtctccacatcagctttaaccgggattgtctatgttccggaaaacttcattgaagacatcaaacatgaagtcgagcaaaaaggagcagccattctggaagatgccaagcagaaagcggcagaaagcggagtaaacgcggaaagcctgtacgtccaaggcgaacctgcgcatcaaattttaaacatagcgaaagaacagcatttcaatctgattgtcgtcggaagccgcggaatcagcggatttaaagaaatgatgctcggaagcgtgagccataaggtctcacaattgtctccttgtcctgtactgatcgttcattaaacagaaggccctgctgatgcggggcttttttcatgagaaaagaccgccggctttcgaaaaatagggtgaaatcttcctctgaatcaagtaaaatggctgttagtatttgtctgaataaacagtcaatgatatgggggaagcaaatcaatgcaagctgaacaaacatcaaatgccgtcatcaaaatggtcatttccatggtcattttcggatcaatcggctttttctcagaacatacgaatgtgccttcaattgaactggtctttgtgagatgtctgtgcgcctcattgtttctgggcgtctgctggtttggttccggacggtaccgcaccgaacaatggaaccggcgggaggtgctgcagacactggcctgcggattttttctcgtgctgaactgggtgtttttatttaaatcatttgaggagacatcagtgacgatagcgatttccgtttatcatttggctccggttctcgtccttcttctagggagccttatataccgggagaaactgcatattgtgtccgtcagttccatcgtgatttgttttctgggcaccgccctgatttccggcatcaacggaagtacatcattttctcagctgatgggatcgggtattatttgggccgtgctggccgcccttttttatgcttttacgacactggccgggaaaggcatcaacagcctcagcccatacgccgtcacctgtttgcagaccggattgggcgttatcattcttcttccgttcgtccgtttcggcgctttttctgatttgtcgcatgtgaactggatcatgattgtgtcgaccggtatcattcatacgggaattgtgtatttgctcttttttgacagcttgcggtttttatccacccggtttatttcaatcatcgtatttcttgatccggcggtggcgattgtgctcgacaccgtatttacgggatttcgccctgacctttatcaatctttggggattgtattgatttttgcgggaatggggctgtccctgattcgaaagcaaaaagccgtgccttcggaagctcaggcagacagcacccgtatataggcggccgtatcggctgctttttttgttttggggcttttcagccataacgaaaaagcagacaaacagatcatggaaaaagaggatagtaattgtataatacttcttgtgtttacaatttaagaaattaaaggagtgaagggcatgataaaaaagacgcgtcatctcgctttcttggctgcattcggatttgcgctttgtctggccatcgtatgttccgcatcaaagcaggcagaagcggcagcggcttatccggatgtgatgcagggacttaccggattcgcgggcaatgcgaaggatcataacggtaaagcaaaatccgccgtatcgggaggccagggcggccccgtcgtctacgtcagcaatctcaatgatttgaaaaacaatgcgggcggaacggatcgcaaaaccatcgtcatcacaagtgatatttcttccccgggtaaagccgtcgtgacagtcggcgccaataaaaccatcgtcggctcttataccagccacaggctgaccaacatctatctgaccaccggctccggctcaaacaatgtgattttcaaaaatctcattatcagccatagtgccgccattacaggcaacaacgacattccgatgtacatagcgaacggacagaattactggattgaccacgtgtggtttgaaggacacagctacaatccgaacagccacagtgatttgggaaagcttctgtatgtcggcgccaaagcggattttgtgacgctgtctaactctaaattcacagaccatctgtacggcctgattctcggttatccgaatgatgataacgaaggacgcaattatatcggctatccgcatatgacgatcaccaacaactattttaataacgtctatgtgcgttcaccgggcctgatgagatacggctattttcacgcgaaaaacaactatgtgaccaatttcaatttaggattcaccattcatacaaacgcgactgttttctcagaagccaactacttcggtaacggaaatgaaaaaggcggaatgatagacgactacgggacggcccaattcaccgacaccggttcattcccgtcgctcaaagccccgaaatcaccgcgcaccggctggaatccgagatcaaattacagctatggcaccctttcagcccaggacgccaaaaacttcgcccaatcctacgcgggagcgcaaaatacaaatctccgctatccataatacgaaaaaccgccggcagccggcggtttttttatatgaataaaaggttcaaaatccctataatccttaaaataaccttaaatacctaggaaaatattgataaacaatttcaataatattactattgttaagcctatattacaaaagaaggaggagaacctatgaaaataggaaaaaagaacaagtggaaaaaatggctggccggcactcttgcggcaacgcttatgatttccattgcgcctgccgatgtatttgcggcagaaacgcgtgaaaaacaagatcaagcgaaaaccgccgacattccggccgcagacccggaaaaagatcttccggcggaaaaagcacccgagcagatgccgtttaatcaaaaagatatcaatcaagacggtgagatcacgtctgaaagaactgagaattcaaagctttactatgaaggcgagggtgtgtacaaacaggaaatctacacagaccccattcatacgaaagaaaccgccaatgcggactgggaagacgtttctcctgaattgaaaaccggctcaaaggaagtcggaacggaaaatacagtgctgaattccgattttctgaagcaaatgaaaaacggattatacgctacatttgaacacaatgatcataagctcacatactcattaaccggcgcaaaaggccccgatcaggctgcaattactccgacagatgcctcagcaaaagtaagggaagacagcaacgagcttacgtatcagcaagtgtttcctgcaattgatttacaaacctacacatttaacgaaaacataaaagaagaccttgtgcttcacaaatatgaaggctacaattccttcacctttcaaatcaaaaccgaccttcaggctaaagaacaggaagacggctctatcgcgttttctgatgataaagacaatgtcgtctacaccgtgccgaagccctttatgaccgactcagatctcgacgaaaagtcaggtgaagtcaacaggtcagaaaatgtcagcttcaagcttgaaaaaaacagcgaaggctacttgctccatgtaacggccgatgaaaaatggctgaaagatcccaagcgggtttatccggtatctattgacccttcaacatcagtatctgtgtcatccgatacctttgtcatgagcgcgtacccgacgacaaactactctgccgcttcgcagaaatgggacgccggattgaaagcgtacgtgctgaaaactggatattatgacggcacaaccggaacgaactacgcttttatgaagtttgataatctaaagccgatcaaaaacatgacggtgacgaaagcgacgctcaaagcgtacacagcccactcctattacggatcaaaagcgacggggctttggctcgacaccgttaacagcaattacgacaatgccaagattacgtggaagaacaagccgggctccaaaaacatcggcaaagccgaggtctataaaggccaatgggcaagcttcgatgtcacctccgcagtcaagtcgtggaacagcggcggcgccaattacggctttaagcttcacacaaacggaaacggaaaagagtattggaagaagctgatgtcatcagcaaactctgctaaaaaaccatacattgaagtgacatacacgattccgaaggcggacacgccgtctgtcaaagcgtatcataacggagattcgacaggatttttcaatatcagctggaaaaaagctgaaggcgccaaaagctataaagtctggctttataacgggaaagaatatcaggccattccggtcggcaatgcaacctcttggagcacaaaaggaaaaaacatctggccgacaaaagcggaaatcgactccggcaaatataagctgcatacagacggaaaaggcggaagtgaattagcgcttaatccttcgccggtctataaaaactccggcggcagctatccggcaagtaaaaattactgggtcgcggtcagcgcggtgtttgaccagggagaaggcgccatgtctgcggccgccaagcccgtcattccgaatattggaagagttcagaaaccgagcacgaaaggctttaataacaacaacgccacaggctggtttgatctttcctggaaagccgtatcaggcgcagccgggtataaaatgcaagtctttaacggcaaaggctttgaaacgcttgacctcggaaataaaacatcctggtccacaaaagatcaaaacatctggccgacaaaggcggaaatcagcgccggaaaatatgcgcttcacctgaaagacaaaaaaggtgcggaattgccgatcaacccgggccccgtttataaaaacgccggcggagatgcgaaccggaaaacctacggatttaaagtcattgcttataacaaagacggagaagcgatcgcctcaccggaagcgagtccggcgctgcctgatatcgcaaagccgaaaaacctgacaggctatgtctatacgaacacgaaatccagccaaacgggttatgtcaatctcatatgggataaagtcaaaaacgccaaaggctacaaaatcaacatctacaacggaaaagattatcaatcattcgatgtcggggataccgatcattggacgacccaaaacaaacgcatctggccgtcagccgatgaagtgaaagcgggaagattccagcttcacacggacggaaagggcggcgaactggcgcttgacccttcacctgtttacgaaaacgcaaacggcaattacaaagggaagaagaactattccttcacgctgaccgcctatgacgcaaacggtgacagcataccgacggcaccttttaaccctgttttccatgaaggggcggaattcctcggaacggaagaattctggtctattatcgacattccggacggacagctgaacggcgcgacgggaaatgtcatcgtcaatgaggaagatatgtcaatcgacggacgcgggccggggctcgggctctcccggacattcaacagtcttgacagctctgaccatatgttcggccaaggctggtatgccgatgcggaaacgtcgatcctttctgaagacggcagagccgtttatattgatgaggacgcgacaacacatgtcttcacgaaaaaatctgacggcacgtatcagccgccgacgggcgtttatctcgaactgacggaaacaagcgaccaatttgtattaaaaacaaaagatcagacgaacgcttatttcagcaaaaaaggcggcaagctccaaaaaatcgttgacggacacaacaacacaaccgtatacgaatataacgacagcaatcagctgaccgccataacagacgcatcagggcgcaagctgacatttacctatgatgaaaacggccatgtcacatctcttacagggccgaaaaacaaaaagatttcatattcatatgacaaagaccttctcaaaaaggtgacggatactgacggcagcgtcacaagctacgactatgatgccgaagggcgcctcgtcaagcagtattccgcaaacagcacggatgacaaaccgctgttcactgaataccaatacagcggccaccgtctggccaaagccgtcaatgcgaaaaaagaaacgtacgactacagctatgacgcggacaaaaaaacgctgctcatgacgcagccgaacggccgcaaagtgcagtacggctataatgaggcgggcaacccgattcagatgatcgatgatgccgaagggctgaaaatcacgaccaacactgtatacgaaggcaacaacgtcattcaggacaccgatccgaacgacgcggatgcgggcaaagcgacagaaagctatcaatatgataaagacggcaacgtcacagccgtaaaagacaactacggcaccgaaacgtatcagtacaacaaaaacaatgacgtaacgaaaatgaaggacaccgaggggaacgtcactgacattgcgtacgacggacttgatgccgtttctgaaacggatcaaagcggaaaatcctcatccgccgccgtgtatgacaagtacggaaatctcattcaatcaagcaaagagctggcagcttcggcgagtctgctgaaagacggcagctttgaaggaacaaagcttggctggaatctcactgctacgagagacagcggaagcatcgcatctgtaaaagcaagaagcggcgcgctgtccggacaaaaagcattggagatctcgtcacaatccgcttcagccggaacagagcacggccatacgtccgcaacgcaggaagtgcagcttgagccgaatacgacgtatacactcagcggccagatcaaaacggatctgacgaaggcgagagcgtatttcaacattgatctgcgtgacaaagaccaaaaacgcattcaatggattcacaatgaatcaggcgcattagccggaaagaatgactggacgaaacggcagatcacctttacaacaccggccaatgcaggaaaagccatcgtctatatggaagtggatcataacgacaaggacggtaaaggaaaagcgtggtttgatcaggttcagctggaaaaaggcgaagtctcttcaagctataacccggtgcaaaacagcagtttcacggccaaaacagatggctggagcacaagcggagccgccgctgaccttgatgaaggcttcgatgatgacagctcattaaaagcgtcccgcacaaatgcatcacaagccaatgcggccgcaaaacaaaccgttacattaggccaaagcgcggacgataagccggtatatatcacgctgacggggatgtccaaggctgacggcgtaaaatttacgaatgacaatgattacgctcttcaggctgacgtcacttatgcggacggcacgacgggcgtctacaccgccaaattcccgcaggggacacaggaatggaaccgggcagcggcagtcattccgaaaacaaagccgatcaataaaatcgaactcagcattctgttccaaaaaagcgccacaggaacggcgtggtttgatgatatccgtttaatcgaaggaagcatcctgacgaaaaacacctatgacgaaaaaggaaactacgtcacaaaagaagaagacgaactagggtatgcaagcactgcttcatatgacgagactggaaagaaaatgtctgaaaccgacgcgaaaggcgaaacaaccgcctacgaatacgatcaggccgaccagctgacaaagctgaccttgtcaaacggcacatccatccttcacagctatgacaaggaaggaaatgagctgacaaaaacgattcgggccggcgcagaccagacctatcaatatgaatatgacgtcatgggcaagctcgtcaaaacaaccgacccgctcggcaatgtactgaagagtgaatatgacgccaacagcaacttgacgaaaaccgtttccgccaacggcaatgaagtgtcgctgacctatgacggcaccgaccgggttaagtcaaaagcgtataacggcactgaaaaatacaactttacctatgacaaaaacggcaatgaaacgtcggtcacaaacaaagaacaaaatacaacgaaaaaacgcacctttgacaacaaaaaccgcctgaccgaattaaccgaccgcggcggcagccaaagctggacgtatccggctgattcggataagctgaaaactttctcatggagccacggcggccaaaaaggaacaaacagctttacgtacaacaaacttgatcaaatgattgaaatgaaagacggcacttcagcctatacatttgattacgatgaaaacggcaatgtccagacattcatcagcggcaatgaagtcggcacgagtttttcatatgatgagcggaatctcgtcagctctcttcatatcggagcgaaaaacggcggcagcatcttccgggaaagctatgaatacgacgccaacggcaaccgcacggtcatcgacagctcagcgggcggaaaggtgcagtacgaatacggcaagctcaaccagctcgtcaaagaaactcatgaagacggcaccgtcattcaatatacgtacgacggcttcggcaaccggacaaatgttaccaccacaaaggacggcgcaagcaaatcagtcaacgcatccttcaacatcatgaaccagctgacgaaggtgaatgacgaagacctgtcctacgataaaaacggcaaccgcacatccgacggcaaatacacatatacgtgggacgcggaagacaacctgaccgccgtcacgaaaaaaggcgaagacaagccgttcgcaacatacaaatacgatgaaaaaggaaacagaatccaaaaaaccgtcaacggaaacgtcacgaactacttctacgacggagacagcttgaatgtcctgtatgaaacagacgcagacaacaacgtcacaaaatcatacacgtacggtgacagcggccagctgttatcctatacaaagaacggcaagaaatatttctatcactacaacgcacacggcgacgtcatcgccatctcagacagcaccggaaaaaccgttgccaaatatcaatacgatgcatggggaaatccgacaaaaaccgaagcgagcgacgaagtaaaagacaaccgctaccgctacgcaggctaccaatacgacgaagaaaccggcctgtactatctcatggcccgctactacgaaccaagaaacggcgtgttcttatcactagacccagacccgggcagtgacggcgattcgctggatcagaatgggtatgcatacggaaacaacaacccagtcatgaacgtcgatccggatgggcattgggtgtggcttgtagtaaatgccggatttgcagcctatgatggatataaggcctataaatcaggtaaaggatggagaggtgcagcctgggcagcggcttcgaactttgggcccgggaaagtgtttaaaggtgctaagaaggctttgggatttgcgaaggccgccaagaagtatttaaaacctggtaaatacgctagaaggtcaattcctgcaagaagtacaagtagcaggttaaataaaaaggaaagaagagtattaaacaaaattgggaataaatatggctgtcatacttgtggtagaaggcaccctggaactaaaagcagaaattggattgcggatcaccaaccagtatcaaaattaaggaagaaaggccagcgacaaaggctatatcctcattgtcaaacttgttcacgaaaacaaggaggatatactagtgctattctgagaaaaagacatcaacggaggtgaggatgttgggtggaaaaaaagaagccattctcgcattgcttaacgattcattcaataaggaagagtttccgtttcttgataatgagaattttgacttcgcaaaagggaagctttcgatttttattgaaagagataactggcttttaacgttccagctgtttggattgtcgagattgggaccagctattgatttttatgcggtgggtaatcaattaacaaataatgaagtaagttttttagatgatgaaccgtttttatttgcagatgaaaaaggaaatttgctggaattggaagatatagaatcgggttttacaagtaaacaaatcaatgtgtctcttagagagaaaacatttcaattttttattgagcaggaaataaaagataagatttccccaaagaatgaatggattacatgtttgaggcatatgaccaaaaatagattatttcttgacacactttggctgacgaaacaagaacaactggaaatagcgggtctctcttcggagtatgaacaattgtattcaacagaattatggatgcatccagaaggagaaaaagatttgcctagtttgtctcctttctttcaatcaattgccgaagcaatttcccgtcaagagatagcatatattcaaaaacatgatgatggtaacacagagtggccaaaatgggcacacacagattctgttcaatacttttgaagatattatagacatgcagtaattggaaataatccgttatatattaaataaattattatgtggaagataaaatataaaaataatttaataaggagaatgaattttgattaaaagtaaagaaattcttagcctattagatgatgaatttagtgaattaaaccgaccaatttttgaatggcgtgaatctaattatgttgggagtaaatgtaccttattaagattaaatgatgacaattggttactggcaattcattgcttcgaagtagattctaaaggaccttttctggctattcatacctatagtaactgtttttcagacaactacaaatcgataataattgatgacttcgccttaaagactgaagcaggtgagaaaataacatatagtgaaagtgattttcaacaattaagcgaagtagtggaaattgaaattaaagagtctcgttattgcgtaaatattcaccaaagaaatgaattccaaaagagtacaaaagaaagggcttggaaaacttatttcaggaatttgtttgaggatgcttcttttagagaggcgctttggataaagccaaaaaaactattaaatatactggatctaaaaagcgaagcagaaggagtattcgaaacagaggattgggaatatcctgattacctaacagatccaagccaattaatttcttttcaatcatttgcgcaatatcttgaaaaaggcgcaggttcagttgatgtaggtgatgtaaataataactggagggagtgggaggattacgatattgagtagttgatgaaggaaacctttttaacctctgggcgtacagaattcagacacgatattattcagggaatgagcggtatgaaatagaaaagaaagaaggccgttctattgggatattgggaagaagaatataaaaacaagaaagttttacttagtgatgaaggcttagatatatgttttgatgctgtagagaaattttgtgaattatataagagggagctggatagagaaccgatattagaagaattcttagcaactttagttaccgtaatgaatacaaatggagattcttctttcacagagttagttgataagcgaatagtagaaataaagccaacgaccaggaaagtgaaaccaatagctaaagtaacaccgggagctgttattcaaatacctttggataagatcgggaagtatacttatgcttgggtcattgaaggtgatctatcaaaaaataaagacgatgacattcttattcagtattataatattttcactgaaaatacacttagcagagaagaaatcattcgtctaatgaaagaagaaaataagaaaatatttgcggctaataccgggcacacaggttttctgcaaggagattggaaagtaatatccaagatgcctcaagagataatagagaaaaacagtcattctcaattgaaatttgttttatatgaagacggtaaatatctcataagtgaaggcgattcatttgcatcagaagatgaattagcagaggcagatgagaaaacaggcaaggacatccctaacccattaggtatatttggacattcatctgtagaatctattctctataaatattttgcaggaatgtcaatggaagaaatcataaagaatgaattgtaaaagactgattccttacattcttgcaattaatgttaaaggatacttactgtacagatactgacagtagtaaatgttttgaatgctgaacgagacataatatgaaaaaaatcaatctcaactctattacacaaaaagaaatcttacaaatagaaaaacaatttgaacgaatcgcattaaacaaaatagaaaacaatcaagaaaagtttagaaaaatgggattgaaaattgaagctgcttttggaagagtcggagacgaaaaagtaataggaaacgaagtacagccctcagattgttttgagaatagttataactcattaatatttttttctgtagcttatttggatggtaccgactttcatgataatgaagatggctattgtatagaccatttagatatatggatttgtgaaagaaggttgttttcggggaaagtgggatatttaacagatttagaaagtgaagaggaaatagcaaaagaaatccaagataagataaatcaattgtttttagaagctacagatataataaaaatattaaaagagtaatttatggcttcttttagttatttttagagaagagatttagagaggttaccaacctctcttatcttatatgataaaaaccaaactacacacggaacacgtgggaataacatatcgctgagacgaagtaaaagacaagcgctaccgctaacaggctaccaatacgacgaaggaacttattctatctcatacgatttacagtgtataaaagatagaaggagagaattaaatgtactatttttatgaaatatcaactctcaatgactatgattcggttgaaaaagagtataaaacaatagaggatttaatatttgttatattaaaaaatatggaaaataaacaatacgcaatgtattcttactctgtttcaaataaagatagtgatacttgtatattctcagcgagcttaaaaacaaatactttgtttaataaaaaaatctcatttataaaaacctcagcagaagagtacaaaaatacaataattgcgcatgaaaatataatcttattggaaaaagatgttgagttaaaagatatattaaatggagcccctttagcagagaaaacaattattaaagatttactggattatgttctttatcatatagaaataacagattccgagacaatcagaataggatctagacataaggaaaatattataaacattattaaataatggcattaaataaaaaatagatgagcctgttgatcatcttttggttaacaggctttttaaaaaaaattatagataataagtgggtaggtgattagaactgagacagtaaaaggtgacaatcgatttaaacttagcttgaattccagagcgtcattcaaatcatttactactaaattaaagctattaagtagagaacgaggagacagcatggccaaaatcggagacggttgtctggaacttgaaataacaccgagaaggtatcatgaggcgaaggatgatccatttatctcaacaacgtttgaactgttggaacataataaagcaatcgcccgcgattactctgccgttttattagaaagtgaatataaaatgctgatatcagatattgaagcattatcagcaggcaatcaagacaggatacgtttagaaacaattgaaccattttttatcctaagtattgataaagaaaacgaacattacagatttatcattagatttatggagaatcattcaaatacaaccttctataaattgaactgtaatgaagaaaagctagaaattttcgtgaagactttaaaatcagatctcaaagactccaaaactttattagggagataaacggtgtacaagacaattaatgaatgggtagattatatagacggagggtgcgctgtccttcattttgactttcatgtgtttaaaaaagagctttcacttaagattcaggtcgttgaaaataaagccgaatgtacgcataacattctttttcaaaatgcagcatctgtttattttagtgcagatattggtgatatgagattagaaaaaatagatccggaagaatacaattggcaagtatttgagatgagttaccacccggaaggaatcggtaatctatcaaatgctgtaattccggagtatcaatcaaatgctaattttcttataaatatgaacagcatgctgattgctgtagaagctgaaacagttcgctttgacgaccaatcattttatgcgtatcatccgaaatcataaataaacaaataagagaggttcccagcctctcttttcttacataacgaaaccgtttacggaggtaaacatgaacactcctttaaatttacaaaaagaatcattgagggctatagggaatctgaatgtgattaatccgcttaaatacaattcgatttattcatgtgatctagtgagtaaagatactttttctcaattaatgaatgacttagaattcgaaacagttctgatagaagtaatggcatcaccttcttttattgaaggatggaagaagaaggttgaaaagaaaatgataaatatgaatactgtatcgaaaaagttcattcatgttgaatgtgtcctaaccaaagaagaattgatggcagatcacttattggatgaattatattttttagcatcgatcaatgactttgtagttataatagcaaaccctgccaaaaataagtcctacatgaacctgaacactcaaaaggttgatgtaactactgaaaataatgaaaaaatcatttggtttgaatacgatgcagcagatttatatatcattgattaatttaatataaattccagattcctaatcaacggagtgttgctgatgttagaacttaccgcggagcgggttgggtcatataaaagagagcacatcatctatttcaatgcgggtcgggatgatcaagtgtttattgtgtcggtgcatgatcacaaagtaatattggaggttatgaaaggcagctctcttttaatcaaaaaagagttacacggattttctgaagatgcccatttctatctggttgattcgtatgatgacactatcgtgatcgtttacctggaaaatcatacgtgtcaattagccgtatgctgcgtaaacagtaataaaatcaatccgatttgttcttttctattaagcgccaatgtatttcatctgggtgaggatggattactatggatcggattaacggacgagggtatgtatgatgagagaaaccctcaagggaaagcgatatttgcttttcatgcagaagacagaacgttttattttaaagacgattttaaagaaatgatgcatgagtgctatgccgtacaatcgatcaaatctgatttgtatgtatgtttcgagggagaggattgctgtatcatcgggcattatcagattggacgggacagaattcgtactgttgcagaatatgtgctggacggcgatcaatactcctattgtgatcagctatccgtttcgaaaaaaagggtgctgctgattcagagtcacgaggataccctatttgcatttcataaagagaacaaaggcttatcagagactgacgtcatgatacacggtattgatagaaaaggagaaacaacgtacagagccgtacaggaccgcatgtttatctttcatgataacgatttatatctggtgaagtattgattacttctatgcagcatacatgccggcagaatgaaaatatcctgtaaggaagtgttcagtgatgagagaaaagttaattgacaagcttgaggaaaacaagaggcattttttaatgaaacaggtgcgtgcctcgctaagatcttgtgaagaatcagggtttgtttatcaattagctgaggcagaacaaagcaggcagatatttgagactatattatcgaattctttcccaagtgcagtgcgtgaagttgatataagcgacaaggagacagccatatcgcttattttagaaaacattgcggatacgggggttgaacggatgaatgatattgtttatctgtttcatccgtatagtaatgaagtcggtgctatcaaatgtgcgctgaaggattgtgcaagtcatctgcactgtctcatggattttatagattttgaaggccggctgctttctaacagctttattttagtggagccgtccttctcattttctgtctgtttatttcacacagaatacggctgtgagcttgtgtgtaaaccgccgaaaagaggtacaagatgcatcccttttttataaagaacacaaaggaatcggcagtctttcaatttcgaatatattccttatttcatgaagacaaagcgttgcccgaacaagtttttaaacaacgaaaacattattatctattcgaagaattccactgggtcttgtctgaagaaggctgggaaatgctcaaaagtttggcgcatcatcatcacgatgaatttatcttaatggctgttctgacacaaccggatgatatgaatcggttttacgaggaattcggatattttaactggttaaagattcctttaaatataaccgaagatgaatatctttcaatcttaactgattatccaaagcacagtaaaaatgacagcataatgaatattgcatcccgcgtcgtatgggcttcaccgactttaaagtgggcgatttacggagagagagattttgaaatctgtattctaggtattgatcaggagattgcgggaaaaacgttaggatcatggaggcccttagacgaccgtgttttagactgggtatctgttgtattcccggatcagattgtttcggatgaatttcaaaaaaagctcgcggcgcattataagtacaaggggaaatgacatgaaaataaaaatgaataagatagtcgaagaatcagtaaaaggatgtttttgtcattttgataactgcgggcatctgtatctcggacggcatcagaatgacgggctttcgtttacgatcatcgacaaatcgggcgatacgcgagtgattcatatcgatgaacaaatcccgtatgaggatattatgctgtttcaacagagttcggctgactggtatgtgttgattttctttgaatcgcatgagtataaagtgaaagtattttcagcagaaggaacagaacaaagtgcattttctctgccttcaggggtttcatgcagtcttttggatgaaaaacaaaacctgtggatcggtttaagtgatgaaggtatttatagtgatgaaaatcctgaagggcacagtgtgctgtgcttcactttagacgggcagctaaagaaaactcacattgatcagcagctttcagaaatatatgcgcccgcggcagatgactgctatgcacttgcagaaaaagacggactgatctacatgctgtattactcttatacagtcattgctgcgtttgatgaaaccgacgtgaaacgagtttggattatttctgataaaacatattccggggtttacgaccagctagcgatttctgatgacgggttttgggtatgcaaagatgatcattcactgtctctcattccggccgatgtcagtctgccgatgcaagaggtaatgtgctgtgatgcggatggtcatgagctttccgggcatcagctaaagctgactggcaatgccatttacgcggtctcgaattcggggatttataagcgggatatcagtaattggaaagtgtcaaaatgagatgatgaaatccaacagatattctttaaatgatgacgtcatccaaaacctgaaattacacaaaaaagaattagagggtccgctgccttcagatgctgggagatttgaagaagactttgagggggctgactgcgcgggggatttttatgagtatttcgcgcttatctgcggcagcttagattttgtgttggcagataaacaaatgcctgcgcggcagcgtaaagctttatataaatccttttttgagctgtatcctcaatatgcgcagctgaaaaatgctttaacggattatccggagctcagccgggaaatcgggcggcatgaacgggtgagagggctgttggtcagcattttaaacaagaaaggcaggcttctgacgtgaaagaaccaacaatagcagaatgtctgaagaaggctgatctgatcctgaacggtcaagcggtaagggaagaagtgtcggattgggcgtgggggtacgtgactgcacatgatccggaggttgaggatgaaaacgtttgggagatgctcgtgtatttgagcggtttgatctgaaagattcgcctgattcgtatctgcatacgattgaagaattaaaagattggatgcagggatataggtaaccgggaatacatgaagaaagggtgcgttcatgtcggaattagtctttacaagaatcaatacaaaaataaacacaagcggcccaatcattctgtccatgaatgcagcggaactcatcgtactggctcaggaaaaagtgcggaaagaagaatatatcaatcacattttcatattccggaacggtgatggacatttacgtcatcgctatcaaattcaaacatcaatgaatataatcggagttcaaaaatcgggggatttatttttgtttcttattcataaggactatgaagatggggtgattcaggaagatccgaatatttatatatggcacccgctcaaagggttttatcattcgctctacgggggacgttatatccggtcaatgacagtcgattctgcgaataatttgtggctgggctacgatgaagcgggaatattttcttgcctggacgacgatatcagttcaaaaggcgtggcccgctttccctttgaagacggaacttggaaatcttgcagtgatactttccgtacggctccgcaccttattgatcatttttacggggcgtatgcaaaaaaagatgccatgtatcttcattatcgtacgcttggtgaagattatattcggaaggtcgatttgcaaggcgaaacgttaagctttcatagggcggactttgactttagtgcacaattcaagaaagattcatcatattattttttgattcggaatcaagcttcgtgccaaattgacaaagcgctaaaatttcataacatgacaaaacaggctggggaatatcagctcactgataaaatctcaagaaaacctctccgttttacgcaagtggctgcttatcaagataaggctgcggggattgatgagagcaacaggctttacttgctgagctgacaggcggcttttaaaaaaggaagggcagaggtgaaacgtttgaaactgcgggaggcagaatacatgaattggcatggtttgagtgaggaggagacagagcagttgtggcgcagggtgaatcgcgcagtgaaatggaaaccgtacagtacatttgcttcaataaaacctccgaagccgtttcaagtctttaatgtatctcaaggattcaatggtatcggttttctggaagatgcagagatgcagattctaaaggcatttcaatcttgtacgttaaagcatgagtttatgtatgcgctggactggcagcatgaatgttatctatttaatcctcatgtgccaattgataaagatgaattcggtgaatggcttgtccccgttattccaaacggagactatggtttctttattcaccaggagtttcagtgggggctgttgggggatccgcggcagcaaaccattacgatatttggctcaccgctaataagggcgatagaaagaaacgctcctgtcttatttcaaaagtgaagacagcttgtgaatgaatctcatgcttttacgggaggaggaataacaggatgacagaagaagagttcggagctgcggaacaaagcttgagagcgtcttttccgaaagcgtataaacggctgcttcataaaaagaaccctgcggaaatcggaggatggattttttttcctatccgtgaacaaagccgcttacagaaaacttgggatgatgtgatcaggcaaaacagtgtgtgcagagaagagagcatgcccgacgatatgatcgtaattgctgacaacggaaccggagataagctgtgcttgaaaaagaaggacggtgtaatggaggagactgtttatttgtgggatcatgagactgccgatgttgagttgtatgccgcttctataggagaatttatagaaaatgaaaaagaataagtggctgattcaagagcttttagaattccgccttttccgggaacgagagatttctgtaattgagttggtgttttccttcgagtatgaacatcagctcatttgtttgaggctcatatgcaaagacgtttcttccgttcaaataaaagaaatggagagtcatgctgctggttcaggcattgtaacaattgatcctgctgctgacggagatgagggacagcattttctcgtggaggagtgggagaaccaaacgttccgcttttattgccgtcaatatgaaacagctgaaaagaaggaggcacaaaatggagtggcacaaacatgagaaagcagttctgctggggccggattcgccgggttgttttgaattgacggagtttatgttctataacgggtataacgagtattatgataaaatcccggtttttgaggtgaagctggctgatggacagtatgatgctgtgctgcggtttgaaggtgtgagtgctgcccggctggatgatctggagagcatcaccgacatccatctggatatcagcccggtcgacggcggctgggaatcgatacgctattatgtcgatgacggggaaggaagaatgagcttctattgcgccaagtgggtcgtgcttgacatgaagaaaaagcagtcccccgaatggcccggcaaaacgtcagggtaaagcggcggcatttcgcgtataatgaggggagccggacagagaaggagtttagtcatgaatgagtttaatgaatatgcgatcagccccgaaatccgacgggcgctgaatggcttgcaatacaccgagccgactgaagtgcagcggcgcgtcatccccgccgcgctgcaaaaaaaagacctcgtcgtcaaatcgcagacgggcagcggcaaaaccgcggctttcggcattccgatctgcgagcttgcggaatgggaggaaaacaaaccgcaggcgctgattttaacgccgacccgcgagcttgcggcgcagattaaagaagatatcacgaatatcggccgtttcaaacggataaaagccacggcggttttcggaaaagcttcttttgacaaacagaaaaccgaattgaagcaaaaaagccacgtcgttgccggaacgccggggcgtgtgcttgatcatatagaaaaagggacgctgccgcttgaacggctggcgtatgtggtgattgacgaagcggatgaaatgctgaatatgggatttattgaacaggtggaagccatcattcagcatctgccgaaaaacagagtcaccatgctgttttcagcgacgctgccggatgacgtcgagaagctgagccgcacatatatgaaagaccctgaattgattgaagtaaaagcggaaggcctgacgacaaaagacattgagcattttgtcaccagaacagaagaagaggacaaaacatctttgctgcgtgatgtcctgatcaccgaaaacccggacagctgcattatattctgccggacaaaagaaagagtcatccagttaaccgatgagctggacaggctgggctatccttgcgataaaattcacggcggcatggtgcaggaagaccgctttgacgttatgaacgagttcaagcgcggcgagttccgctatctcgttgcgaccgatgttgccgccagaggaattgatatcgaaaacatcagcctcgtcatcaattatgatattccgcttgaaaaagaaagctatgtgcaccgcaccggccgaacggggcgcgccggacaccgcggccgggccatcacgtttgtgacgccgtttgaagcgcggtttctgaatgacattgagacatatatcggtttccgcatccaaaagcgggaagcaccgtcagaaaaagaaacagcggaacggaaagcagcttttgcggaaaaactgaacgcccgcccagacgtcaaaacagacaaaagcgaacagttaagcaaagacatcatgaaactgtactttaacggcgggaaaaagaaaaaactcagagcggtcgattttgtcggaacgattgcgaaaatcgacggcgtttcagccgatgatatcgggattatcacgattctggacaacgcatcgtacgtcgaaattctgaacggcaaaggcccgcacgttcttgacatcatgaaaaatacgacggtcaaaggcaaaaaactgaaagtccataaagccaagaaataaaaaagaaagcctgccgcgcgcaggctttttttacgccgtctcctcggggacgaacgcaaggatggcaatgccgatcacaaataacaaaatcaggctgaacacggcggctgacgaattcccggtcagctgggcggtgacggcaatcaaaagcgggccgataatcgaagcgaacttgccgaagatattataaaatccgaaaaactcattggcgttctgtttggggacaagctttgcaaagtaagagcggctcagcgcctgaatacctccttgggaagtggcgacaagcatagccaaaatccagaagtcaaaagcggaatccataaaataagcatacgtgcagacaatcatatacacgccgattccggcataaagcatcgtttttcctttaaaccgttcggccagccgcccatacaaaatcgaaaaaggcgcggcgacgacctgagtgacaaataaaacaatcagcagatttgccgcgctgatgccgaggtcagccccgtatgacgtggacatcgtaatgatggtgccgaccccgtcgatgtagaagaaataggcgagcagaaacaaaaacagcgcccggtgcttcctgatctgcctcagcgtgccggccagccgtttaaaactgctgattacaagccgcggctccctctcgatataatagcgctggcggacgcggagaaggagcgggatcgaaaacagcccccaccatgccgccgtaatcaaaaaggcaatgcggccggcagcctgggcggacagcggaatcacctccgcttgtgctgaaagaatcacggcaatgctgaggagaaaagggatcgtactgccgatatagcccagcccaaaccctctggcggacaccatattcatccgctcctttgcggccacatcaacgagaaacgcatcataaaacacattagacccggcaaagccgatcgtggaaatcgtataacaaattaataacagcatccaagattcgccgggaatcaaagccagcgcggctgtgcccgccacaccgatcagaagaaagaaggcaaaaaaccgtttcttgcatcctttgtagtcggcaatcgttcctaagacgggaccgagcatcgccaaaataaaagtcgcggcggcaatcgtatagcccaaataagcggtagaatccgccgcgctgacaccgttttccgccgccgcggctttaaaaaacaaggggaataccgccgtcataataatgaccgaataagctgaattggcccaatcatacagcatccagctgctttcttctttcgaaaaccgtttcatcacacacgctccttcccaaaaaccggttctctgcattatatgcgccgctgcctcatcgttggacaatgatttctgaacggcgttttctgattgacctggagatattgacctagttcaaaaaggatgtaaaatcaaggtgtagcaggtaaatggtcaggcgggagggagacagaattgaagattgcgaaagtcattaataataatgttgtcagtgtgctcaaagaagacaatcaggaattggttatcatgggccggggcattgcttttcaaaagaaaacgggagacccggtagatgaagcccgcattgagaaagtgttcacgctcgataacaaagatgtatccgaaaagttcaaaacccttttgtatgatatcccgatcgaatgtatggaagtatccgaagagattatcagctatgcgaaattacagctcggcaaaaagctcaatgacagcatctatgtgtcgctgaccgaccatattaactttgcgatccagcgcaataagaaagggctggatatcaaaaacgccttactgtgggaaacgaaacggctgtacaaagacgaatttgcaatcggcaaacaagcgttggccatggtaaaaaacaagactggcgtgtctctgccggaggatgaagcaggctttattgcgctgcatattgtcaatgccgagctgaatgaagagatgcccaatatcatcaacattacaaaagtcatgcaagagattttgagtatcgtaaaataccattttaagattgacttcaacgaggaatcacttcactattatcggtttgtcacccacttaaagtttttcgcgcagcgtctttttaacggcacacatatggaaagccaggacgattttttgctggagacagtgaaagaaaagtaccatcgggcgtatgaatgcacgaagaaaatccaaacatgcattgagaggacgtatgaacacaagctcaccagtgacgagctgctgtatttaacgattcacatagaaagggtagtcaaataagcataatgaaagcgttggcatttttttcttcatttacgtatgatcttgttaggattgttactgataagcaggcaaaacctaaattacaatgagcactgatcatttctgtttgtgctgatggtaatttaggtttttttaagattcattattatcattattctgaccgatgtccccttttaacagaatcatgtatgatcaataaagaaatcgctttcaaagaaaggggaatgccgacatgttttatcgtatgaaacgagtgctgctgcttcttgtcactggattgtttttgagtttgtgtgcgatcacttctactgcatcagctcaaacaggcggatcgttttttgaaccttttaacagctataactccggattatggcaaaaagcaaatggttattccaatggagatatgttcaactgcacgtggcgtgcaaataatgtatcaatgacgtcatcaggtgaaatgcgtttggcgctgacaagcccgtcttataacaagtttgactgcggggagaaccgctccgttcaaacctatggctacggactttatgaagtcagaatgaaaccggctaaaaacacagggatcgtttcatcgttcttcacttatacaggtccaacggatggcactccttgggatgagattgatatcgaatttttaggaaaagacacgacaaaggttcaatttaactattatacaaatggcgcgggaaaccatgagaaggttggggatctcggatttgacgcggccaatgcctatcatacgtatgcgttcgattggcagccaaactctattaaatggtatgtcgatgggcaattaaaacatactgcgacaagccaaatcccgacaaacccgggaaagatcatgatgaacttgtggaatgggataggtgtcgatgactggctcggttcctacaatggtgtaaatccgctatacgctcattatgactgggtgcgctatacaaaaaaataatgtacagaaaaggatttccgctggcggaaatccttttttaattaaaacgaaataatcccaatcaaaagcgccgcaatcgtcatcacaatcgttgtccccacggcccatttaatagtgaatttttgatgatcgccaaagctgacgcccgccattccgaccaatagataggtggatggcacaagcgggctgagcagatgcaccggctggcccagcaaggaggctcttccgatttcagcggcgtctattccgtaagcggaagcggcttcggcgatgatgggaagcacaccgaagtaaaaggcgtcatttgacatgaaaaaggtgaaaggcatgctggcaatcgcagtgatcaacggcagatgcgggcccatggcatcagggatgagggaaacgagagaatgcgccatcgcatccaccatttttgtgccggagagaatgcctgtgaatatgcctgccgcaaacaccattgagacaacgtttaacgcattacccgcatgcgctgaaatccgtttctgctgctctttgacatttggatagttgatcatcaaggcgatggcgaacgcgatcataaaaagaacagggattggcagcaggctggtgatcagcgcggccatcagagcgacagtcagcaacaggttgaaccactggagagcggggcgcttcagcggcgccgcctccggatcagaagacggcgcgtgttcaattgaaatgacaccgagccgcttccgttctttttttccgaggagataagcaacggcgatcacccagagaacgccggcaatcatagcaggaatcagcggtgtgaagacctccgacgtgtccaatttcaaggaagccaaaaccctcgccgtcggcccgccccacggaataatattcatgacgcccgaaccgagcatcgcgatccccgccagcaccaaacggttcatgccgagccgtttgtaaaggggcagcattgccgcaatcgtaatcatatacgttgttgtcccatctccgtccagcgaaatggtcatcgtcagaaccgctgtgccgacggcgatttttaacggatcccctttgacaagcgatagaattttggcaatgaggggatcaaacagacctgagtcaatcataatgccgaaatacaggatggcgaataacagcatgatcccggtaggagcgaggtctgtaacgccttgaatcatcatctcgccgagatctttgccaaatccgctgatcagggcaaacacaacaggaacgacaatcaaagcaataagagcggaaagccgattagacataataagatacataaagacaatcatcatcacaaaaccgagtatggcaagcacgatatgacctcccctgttcaatagctgtattggtaagcgctttcacaatttatttctgtgaaaatggcttatttcaaaatgtgtatgaccgcatatgtaaatacagacctaaaatcctaatgagccgatcagcagtttatatgaagaacgccgcgggtaaatgtgctgtagaatgtttcgttttaaaagggggaactgacatgagtgatgatcaaaacaaacgagtaaatgaacactcaaaggacgaacagctggagcagtaccggtctgataacagcggcaaaaaaatgacgaccaatcaggggcttcgcgtgtctgaggatgaacattctttaaaagcgggcgtccgcggccccacgctgatggaggattttcattttcgtgaaaaaatgacgcactttgaccacgagcggattccggaacgggtcgttcatgcgcgcgggtacggcgttcatgggcattttcaggtgtacgaaccgatgacggaatatacacgggcgaaatttttgcaggacccgtccgtcaaaacgcctgttttcgtccgtttctcaacagtggcgggctccaaggggtcagccgacaccgtccgtgacgccaggggatttgcgacgaagttttatactgaagaagggaactatgacctcgtcggaaacaatattccggtgttcttcattcaggacgcgatcaaattcccggatctcgttcacgccataaaaccggaaccgcacaatgaaatgccgcaggctgcgacggctcatgatacgttctgggattttgtcgctaataaccctgagtcggctcacatggtcatgtggacgatgtctgaccgcggcatcccgcggagctatcggatgatggagggcttcggcgtgcatacgttccgtttcgtcaacgagaaaggaaaagcgcgctttgtaaaattccactggaaacccgtgctcggcgttcattccctcgtatgggatgaagcgcagaaaattgccgggaaagatcccgatttcaaccgccgcgacctgtgggaaacgattgaaaacggcggcaaagtcgagtatgagctcggtgttcagatgattgacgaagaagatgaatttaaatttgatttcgatatccttgatccgacgaagctgtggccggaggagttggttcccgtcaagctgatcggaaaaatgacccttgaccgcaatcaggacaatgtctttgcggaaactgaacaagtcgcattccacccgggcaatgtcgtgccgggcatcgattttaccaatgacccgcttcttcaaggccggcttttctcttatacggatacacagctcatccgtcttggcgggccgaattttcacgagattccgatcaaccggccggtctgcccgttccataacaaccaatacgacggctaccaccggatgacgattaataagggccccgtcgcctatcataaaaattccctgcagaacaatgatccgtcgccggcctcagaagaagaaggcggatacgttcattacgaggaaaaagtagaaggcagaaaaatccgccagcgcagtgagagcttcaatgactatttttctcaggccaagatgttctggaacagcatgtctcccgccgagaaagaacatatcatctccgcgttctgttttgaagtcggaaaagtgaacagcaaggacgtgcagcagcaggtggttgatgtcttcagtcacgtcgacgccgggcttgccgagcgtgttgcgaaaggaatcggcgtgaacccgccgccgaaggaccgtgaatctgatgaaacgttcacttccccggccttaagccaggaaaacacggtgaagacggcagcgacaaggcaggtcgcggttttaaccgaccacgggttttctgatgagaaagtcaaacaagtgcttgacgcatgcaaacaggcgggagtcagagccgatatcatcagccccgcgctgggaaccgtcaagggagaaaacggtacggagctgaaagcgtcagccactttcctgacagcggattccgtcctgtacgacgctgttttcattccgggcggaaaacaaagcacagacagcctcaaagcccaaaaatcggccagagacttcgtcagcgaagctttcagccattacaaagcgatcggcgcctccggtgaaggaaaagaacttctcgccctcgccgccggaaccgaaagcggccccggccttgttccggacgggaaccatgaacaatttctgaaggccgtggctgagcatcggcattgggacagaaacatataagaatgaaaaagcgccttttatgagaggggcgcttttttcttgtgaaagtgaaatatctgaacgaagcattaatattgggagaaaacgaaaatggcttccgtgcaaatccgtccgggacattcagacaacagttctagagagtcagggcattgcattatttaagggttctgactgatggtgaaatgatctttggtttacttccgctctgtgtttgtgtatcttaggggtagattttctggaggagcgaatgatagtgaagccgtttaccgaaaaacaactcgaagaatattaccggcgtgacgaaaacatgatgattttggtgtttgcccagtggtgcgtcaatcatgaccttgatccgatggccatttacagcaaggcttatcccggacagcctttaaacgaagagctgcgaaaaacggctgaagagcttgtcgtgccgaaggaggaatcagaaccgattcctgatcaaaccgttatcggcgttttggagatgttcggcaactccgatttggcggaagccgtttatgaagccattgcgcaaagaccttcacggtaaaagaggcgtggattttccatgtctctttttttcatggagaaaatgtgaaagaaggcccagaaacaatttactgatctgcgctgtctatagagtgtaacccgttttcaaaaagggaacggtaatgaaaaggaggagttgtgatgaaaaaggcattcaaaatgatggcggccgtgctcttaaccgtgctgacagccgcgccgttcggaggtttcgcgccttcagccgaggccgcgcaaaccgcaaagcctgttgtcaaaagccatacgtataagcatgtaaagcagctgacataccccgaggtcacaaatacgggaaacgcatcttttgaaaagaaagtcaatcaggacttcaagcgctatattgaacaatcgtacaaagaatatgtgaaaaacaaaaaagacggtgaaaaacaaggctacaaagcggaataccaaacagattttaaggtgaagtataatcaagacggcaagctcagcattgagacggaagactacagttacacaggcggcgcacacgggctgacatccgttcagacctttaattacgacctggccgcgaaaaaacgggtcacactcgataatgtgctgaatacaaaaacgaaagctaacaaaacgagagactatctttacggctacatcaaaaaacatgacgatctgttcgaccgggacgtcaaaaaacaagatattactttgaataatgaaagacctttcttctttacgaaaaacggcattgccgttgtgttcggacaatatgatctcgggccttacgcggcaggaatccgggacgttttcgtacctgcatccgtctatcaataaaaaaaagcgatatcactccaaaacggagcggtatcgctttttttcttttaccagacaaacaatccgacaatcgccgcgctcaataaggaaacggcaattccgctgacaagcagcttccagacgttttttccgatgatggctgatttttcaccatcaagcagagattgataagatccgtagatcataccgatggtgctgaagtttgcgaatgatgtcaggaatgtcgtagccacggcaatcgtgtgcggcggaagtgaattcagctgccctttcagatcggccattgccacaaattcattcgtcgcgagcttgatgcccatcagctgtgcgacatacatcgcgtcatgtacgcctaatccgaggaggaaggcaaacggactgaagatgtatgagaaaatcttttgaatggtcaacccgtgcatgaacagcccgagtacgccgtttaacgcggccgttaacgccacatagccgatcaccatcgctaaaatgacaatgaccatgttcatgccgacaagcatactgttagaaatcgtggagaagaagtcttttttctccgcttttgaaggcacgtaaataatatcatcctctttagaaacgtccacgggattcagcatattggcgattaaaagcgcgtttaagcaattcagcgggatggctgtaaacacataagtggacggaaccatcgtcaagtatgatccgatgatcgagccgctgatgctgctcatgctcatcagcccgaatgtcagaagccgattgttgctgacggcggcaagctgctggcggatgacggctaaagcttccgtatttcctaaaaacatcatctggatggagaaaaagctctccagcttcggcagacgggatattttagaaatcagccagccgattttatcaatgagccacggcagaataccgaaatacgacagcatatcaaagaaggtcacgacgaagataatcggcagcaatgcgctgaagaaaaaatcaaccgtcggattggccatgacagacggaaaagcgaacgcaatcccttgactggcgcaggaaatcagccatgtaaagaacgcgccgatcttcccgatgacaaagccgccgacttttgtccctaacataaaccaagtaatcagaaactcaaagacgaggagcatgacaatcggacgccatttaatcttcttcttgttgggagagcataagaaaacaacagccatgacaacaatgagaccgacaatgttcaataaaaagtacatgtgagcaactcctataagggtattatggaaataaaaaaagctcttattcgtcacaaattcctgaaagccagaaagtgtgataaataagagccaaaagaaaagaatagactgacagcatcatatgcttttcactcgttcaaatttatgcaaactttcttgtagtctagtcttttacggcactaggtagaaacaatcagaccatattactgatcatatacaagaataacgatattacatgagatagcagtattttatcgtttcaatttttgaaaatcaacctttttagatattttcaaaataataaatttatattataaataaagaaaataaaggatgtgcataagtaattggataataaaggtataaaatacccccaaaaccgttccggttcattgtaaagacgggatgcagctgataaaatggatctgagggcacagccttcaaaagacggcagaaaaggggtcattttcgtgatcatccagttcattcgttacagataatgagaggtatagatgaataggttaaaccttccaattcggcgaggtttatttgtctatgcctttttcatttcatcggaatgacgaatgaatgaggtgtttttttgacgtctataaaaagaaaacgcgcggaattactgcaatcatgccagtccgtgttcaggtgtccgctatgccggtcggccatggcggtctcacaatacaaaagcttgatttgcggacaggggcatacatttgatatatcaaaacaaggatatgtgaatttcctcaataaatcggtcaaaacccgctatgacaggcagctgttcgaagcgagacgcgagctttttgacagccgggaattttttgggccggttcaaaaggagatcgccgccatcatcacccatattcaatctccgcaaacatcagcggcggtattggatgcgggatgcggagaagggtcacatttagccgccgtatgcaaatggcttcagcctgctttttccgtgacgggaatcggcattgatctctcgaaagaaggtgtgctgcatgccgcaaaggccttcgggaatcatatggtttttgccgtcgctgatgtggcggatgcgccgtttgccgacagctgttttgatgtcgtgatgtctgttttatcgccttggaattacaaggaatgcagcagacttttacgaaagggcggcacagtcattaaagcggtgccgcggcgtgattatttgaaggaagtaagggaattcttcttcggagacagccctcggcggaatgacaccgccgattctgcggccggacgattccaagcgggctttcaaacctttgagcgcaaacggctgtgttacacaaagactttagcgcagcctgacctcgagcggcttgtgaaaatgacgcccttaacatggaaatgtactgatgacagcatccggcggtttatcagccggaaagaggctgctgtcacgatagatatcgatattttaatcggaaccgatccgctgtaaaacggaaaagacacgctaatcgcgtgtctttttttttatttccagacttcaccggcaatgttgacgacatggcgcagtttcgcccattgctgttcttctgtgatcaggtttccttcctcagtggaggcgaatccgcattgcgggctgaggcaaagctgatccagactgacatattgtgaagcctcttcaatgcggcgtttaatcgcgtccttgtcttcaagttcgccatgtttcgacgtaatcaagccaagcacaagctgaagatcagagcgtttgacataacggagcggttcaaagccgccggagcgggaatcatcatattccagaaacaatccgtcaagatcaagcccgtcaaaaatcgtttcagccgctgcatcatagccgccttcagccgtccatgtggattggaagttgccgcggcagatatgcatcgtaaccttcagatcgtcagggcgatccttgatggcgtcattaatggaagcggcaaacagcttgcgcagctcatccggcgtcgtgccgaaagcttcaatctgacgaagccccgcttctgataagaaaacggcccatgcggtgtcatcgagctgaaggtagcggcacccggcgtcatagaaagcttgaatcgcttttttatacgcttttgacacatcgtgctgaaattgtttgtaatcattctggtaggacgctttttccaattttccgcggaaaaacagcatattcggacttgggatggtcattttcggaacagcatcgccggcaatgctgtgcaggaatttataatcttcgagcatcggatgctgagaaaaatcaatatctcccgttactttaatgccgcgcgctttcgtctgtacgttgtgaaactgaatgccgctttcaggcgtaaacgcttcgacgccgtctaaattttcgagaaaatcaaaatgccaccaggcacggcggaattcgccgtcagtcacgacattgaggccggtttctttctgcttttctacgctgcggatgatttctctgttttcgatttcgcgcagctgttctgccgaaatctcacccgccgctctttgcaggcgggcttgcttcacagccgccggccgcagcaggcttccgacctgatccgcgcgaaacggcgggttttttcttagaagcgtatgcaatggttgttctgtgttttgctgtgacatgaacgattccttctttcctgatgaaatataaaaaaactcttccctcggatagggaagagcttgcgtccgcaaatctcaaccttatcttcaggatttagcaccattctgctgaacagcggttgccgggtatcatagggccagtccctccacctctcttgataaggaaatatgctatttttcagaataaactgtaatactcttaatcttagtatattatcttatattgtcaatatatttcgataaatatttttatttgtcaccctcaaatagaatcatatctatcacgatggcgatcgcgagacaaagaacgatatcctcttccttttcaatctgcaaatgataggaatcgccccagctcatccatgatttggtgacggtcatccggtttgattttccgtctgtcacttgaaaattccggccccacacatcgccggtaagatcccagccgagtccggaaatttcaaatttcggtttgaaaaacgtgactttcttgatgacttggcagacgggtttgccgctgacggaaatctcgtaacggggaacgagcgacatcagtttctggttgacgctggcgagcgtgcggccgtccaaatcagtcagtttcagttcatcaccgaatgaaaacagctttccttcaacattgtagacttcttttccgctttcaagaaacacttgaaaacgattcttaaacgtaaacattcgctctttgatgtaaaaatggtacataaaaaaactcctttcttatgttgtacgaaaaaaggaggcggttggtttcatatcggccgggtgcataaaaaaaaggctgccgattttgcggcagctgtcgtttttatgatatcggcatccggcgtttttgacggatcgcatttaaatcaatgatgttattcgtgtcggcagctgtcaccagcgggcttgtctttggcgttttccggcggttgtccttactgaaagagaaaacaagataccctgtcaaagcagcaaaaataagtagcatcattttacatacctcccaaaaaaagttttggtattattattgtacgaaaaaacaaacgaaaagtattcaaacaattgtcacttttttaaaaaataacgtcattttccgtaaaaatgactatgggttgaagagattttgctcttgttgtggttctatagattgtatcggctgatgaatgatgatcgtttatataactttttcactattttttgtaagtgtctaattaactacttcagtgttttcgtttgccttgtgttattcagtaccctaaaaaaccttatcatatgcaaaataactgcttctaacagatgactgcgggatgacagcgctttctttatttttttaaagaaaacgagatgttatcttaaaaaaatcgtttgaacattttccgcagttttttaaaagggtttgatttcgtctccagaatacgcgggtcttttaaggtttttttcaattctttcgctacagtccctcttgccatagtcttcactccttctttccaattcataccttatatacggaaagaaagaaggaaaggtttcatgtgaaagaaaaaaaccaaagcagggggctttggttttaagcgcgctcttcaaagagcctggcgatttcaacaatgacgtttaccgccttttccatatgatcgacggaaatgtattcatattttccgtggaagttttggccgcccgtaaaaatgttcggtgtcggcagccccatgtaagagagctgtgatccgtcggttccgccccggatcggttcgataatcggttcgatatcgaggtttttcatggcttgataggcgacatcgactatctctttgaccggttcgattttttctctcatgttgtaatattgatcacgcagttcaagcttgatgctttccttgccgtatttggccgccagcgcatcggcggttttctgcatatattcttttcgttctgcaaagcggtctctgtcaaagtctctgatgatgtacgacagggcggcttcagaaacgtctccgttcatggaaagtaaatgatagaagccttcatacccttccgtatattccggcgcttcttctttcggcagcgcgtgatgaaattccatcgcgatttttgaagcgttgaccattttgtttttcgccgttcccgggtggacgctttttccgtaacaagtaagctttgcggcggctgcgttaaagctttcatattgcagttcgccgagggggcctccgtctatcgtgtaggcgaatgcggcgttgaagcggccgacatcgaatttgtgagggcctctgccgatttcttcatcgggcgtaaacgcgacccggatcgttccgtgtttgatgtccggatgtttgatcaagtacgccattgccgtcatgatttcggcaatgcccgctttgttgtcggctccgagcagcgtcgtgccgtctgttgtgatcagcgtctggcctttatagcgggagagctccgggaattgctcaggcgacaggacgacattgagtttgtcattcagaacgatatcatgtccgtcgtagctctcaataatctgaggattcacatttttcccggtaaaatcggtcgcggtgtccacgtgagccagaaaaccgacagtcggcacgtctttatccgtatttgccggcagagtcgccatgacgtacccattgtcatcgactgtgatgtctgtcatgccgatcgactttaattcatctgccagcatgttggccaatgtcagctggccgggggttgaagggcagttttcattgttttcgtcagactgtgtatcgacttttacataagaggtaaagcgttcaatgatttcatttttcataccgtcatctcctttgtcttatcttaccatgcgcgggggagggatttctatttcacaacccgtttgaatcgagggctctgtgtattacgcgaatgaaaacaaattatgaagaaacgatgactaaacgattaaactttttggaaatggatgattgaggaagaaaaaaccgatataatatggtcaattcattcaataggggaggctttcttcatggcgattttagtgacaggcggagcgggttatatcggaagccacacatgtgtcgagctgttaaacggcggctatgacatcgtggttttggataatctgtcaaatagttcaccggaagcattggagcgtgtgaaagacattaccggaaaagggcttgtattttatgaagcggatctccttgaccgtgacgccgttcaccgggtgtttgctgaaaatgagattgaagccgtcattcattttgcgggattaaaagccgtcggtgagtctgtagctgttccgctccgttattatcataataatctgacggggacgtttattttatgtgaagccatgcaggcacacggtgtgaaaaaaatcgtcttcagttcttcagcgacggtttacggcgttccggaaacaacgccgatcactgaggattttcctttaagcgccaccaatccttacgggcagacaaagctgatgctggaacagattttacgcgatctgcataaagcggattctgaatggagcattgcgctgctccgctactttaatccgttcggcgcgcacccgagcgggcggatcggagaagacccgaacggcatcccgaataatttaatgccgtacgtcgcacaagtcgctgtcggcaagcttgagcaattgcaggtgttcggcaatgattatccgacaaaggacggcaccggcgtgcgggattacatccatgtcgttgaccttgccgagggccacgtcagagcgcttgaaaaggtgctgaacacaacaggcgcggatgcctataatctcggcacgggaagaggctacagcgttcttgagatggtcaaggcgtttgaaaaagtatcgggaaaagaagtgccgtaccgttttgccgcccggcgcccgggagacatcgccgcatgcttcgcagacccggcaaaagcgaagactgaattaggctgggaagcaaagcgcgggcttgaagaaatgtgcgccgactcttggaagtggcagtcctccaatgtgaacgggtaccaaaaggtgtaaaaagaaagagaccttcaaatggtgaaggtctcttttattacggtcattatttaattttcacttcaacatcgttgctgaactttaatttccaagtgcctttagagtatgcgtttttatcaacttcaaaagcttttacgtcagtaactttaatgttcgggttcaagtcacttaaaattttactgttgtctacttttgtttctgttgcatagcttgaagaagcatcaatatctgaatcataggatgttcctttagaatctactaatttcgctcttggaatggagaaagagcttaacggcttgtttgaaacatttttaactgtgtattgaacagctacgataacgccgccgtcagacgcttttttctcgacaaattgagagcctactgaatctcttttttcgactttcgtaacagtaacttcagttttctcagtcttaacagtgtcaccgatgttatacagtttttccttggattccgcagcttttgaagacgcggttttagatgatgaagatccgcctccgccgccgatgttcacgagaatgataataaccactactgccagaagcaatgtgataattttatgtctcataaaaaagtttctctgatctttaccgcagtttgggcattttttaacgcctttagcgatttctttgccgcatgccttacaagacaccaggttgcctgccataatatttcctcctatgtaaactatttcttgaaaactacatactataatgcctgtaaaataacctatagtcaataatattttgagaaaaaaagtattttaatgattttttagtcatgtattttaaggaccttttttagtatcggcagatcgttcgaattttttatacgtttattgaaaaaagagtggttgaacatgttcgtgatttcccgtataatcttgaaagatatacaaaaactgaacataaaaaacagtggttttctagggttccgcaatgctgaattggtctggaccgagagaaaacacacagcaggttcctgctgtgacacgttgggataaaagcccgggagtttctgctcttttaatgaagagtgctctcccgggcttttttgattttatataaagggagtgtctgggatgaaaaagagattgctggatgtgctgatgctgattattggggcttttatctttgctttggccgttaatttattcgccattccgaatgatcttggagagggcggggtaacgggaatcaccctgattttgtactatgtgtttgaatggtcgcccggggtgacgaatatcattttgaacgggatcttattgattatcggatataaatttttagacggaaaaacaacgctttatacgatcattaccgttgtcgccaactcactgtttctgcatctgacgcatgattggcactcgccttcacatgaactcattattaatactatttttgcgggtgtgtttgccggtgtcggaatcgggatcattattcgagtcggaggcacgactgcgggttctgccattttggcgaggattgcgaacaaatatctcgattggaatatcagctatgcgcttttgttctttgatctgattgtcgtcttcagttcttatttcatcatcggtgcagaaaaaatgatgtttaccattgtcatgctgtacatcggaacgaaggtgatggactttatcattgaaggcctgaatacgaaaaaagcggtgacgattatatctgagcataagcacgaaatcgccgaacaggtcaacacgcttatggacagaggggttacgctgctgtcgggtaaaggaaattacacggggcagtcgaaggaaattttatatatcgtcatccagaaacaagagctttccatgctcaaaaaaattattaaaagctgtgatacaaaagcgtttgtcattgttcatgatgtgcgtgacgtctttggtgaaggcttcgtcgatatctctaaataaaaaggatccctctgccggcgcggagggtttttttcttatgccggcagaagctgttatgatccgtttcccgggaaatagcctgaaagctgtttcttaaaacgaagtggatacaatcggccggacgttttatactgacaatatgatagagcgatagagaggagcgcatatgaacccgttattggcaatttacccgagggctgtgttgtctgatacgtgctgtacggcggaggatgtcttttgcttttatgatgagaaaaggcggatctatgtcgccattccgaaggaggatatcaccccgaaggagaaactgcttctggaatcacttttgacgcccgctgaagaaaaaggcgatttttttccggagacggcggcagcaaagaggtggcggcggtttctgctggaagaaggcccggtgcctgatgtcaaggagccgcgtgtccgttttatccattatgacttattgggagaacgggactggggggcatttacggaagcgctgcgccatttctggccggtttcatatacagttgtccggacgggaagggatcagggcgtgattgtggaggaagaaaagctggaagcgccagattcggatgacatcgcatcttttgtgaagattctcgaaggcgatttttatttcagtgtccgttttttcatcggaaggtattatggcgcgggagaacgtctgcgccttcattatcggagagaacagcaatattgtcagattggccggcgtcatctcccgcagctgagcacgctgaccgcggaaacggtatttccggctatgctcatggaagaaagcagagaaaagctctcagccttgcttcacgaagaagcggtgctgctgtttcagaaagaaccggagctgaagcatacgattcagacttttattgaacataactcgaacatgtcgctcacatcgaaaagactgcatttgcaccgtaacagtcttcaatatcggattgataaatttgcggaacgctcgggtattgatattaagacatatctgggcgccctgctggcttatttcatttgtctgcagtatgaaaaatcacattaaatgggaaatgtgcacgaaggcagcggactttttttatgaacattgcctatatccgccgccgtctgacgctgttacaatcctattaaagaaagcgtttacaaaaagggggagatgacatggcggaacttcggctggagcatatttataagtattacgatcaaaaagaagcggctgtcgatgattttaaccttcatattcaagataaagagtttatcgtgtttgtcggtccgtcggggtgcggcaagtcgacaacattgcggatggttgccgggctggaagacattacgaagggcgatttctatatcggtgacacgagagtgaatgatatcgctcctaaagacagggatatcgccatggtgtttcaaaactatgcgttatatccgcacatgacggtctatgataatatcgctttcggtctgaagctgaggaagatgccgaaacctgagataaaaaaacgggtcgaagaagcggcgaaaatgcttgggctcacagagtatctgtaccgcaaaccgaaggcgctctccggcgggcagcggcagcgggttgcattaggccgggcgattgtcagggacgccaaagtgttcttaatggatgagccgctgtcaaatctggacgcaaagcttcgggtgcagatgcgggcagaaattattaagctccaccaaaggctgcaaacaaccacaatctatgtgacgcacgaccaaacagaagcactgacgatggcgacacgcatcgtagtcatgaaggacggaaaaattcagcagatcggcacaccgaaagacgtgtatgaacatcccgaaaacgtatttgtcggcgggtttatcggctccccagcgatgaactttttcaaaggaaagctgacggacggcgccattcagatcggttcagccgctctcagcgtgccggatgggaaaatgaaaatgctccgggaaaaagggtatgccggcaaagatgttatcttcggcatccgcccggaagacatacatgatgagctgattgtggtagaatcctataagaagtcatccatcacagctaaaatcaatgtcgcggaattgctcgggtcagaaattatggtttattcccggatcggggatcaggattttatcgcccggattgacgcccgccatgacatacgtgccggtgaggaattgaccgtcgctttcgacatgaataaagctcacttttttgacagtgaaacagaaatcagaatccgctcataacgcaaagccggacagctggatgtccggcttttttgatgtaacaatttatgacgcataaccgatataaaaagtaaatagaagacagaaagcaggaaaacgatgaaacgcatgatcatgtgcatgtgccttttggctgccgtgtttacgcttgccgcctgctcgggccatgaggcaagcgccgaacaaagcattccgaaggcagaagcgcaccacgataaaaagtctgtaaagcgccaaatcaaaaaagagccggatacgtccgcctgggttcaaacgaaaggaacggcaagactgccgattctgatgtaccacagcatttctgagggaaacagcctgcgtgtgccgaaggaagaattccggcagcatatgaagtggcttcatgatcacggctattatacgatgactcctgaagaggcctatctgatgctgacggaggataaggagccgcgtgaaaaatgtgtgctgatcacatttgatgacggctataccgacaatgtgaaagcggcctatcccattttaaagaaatacaagatgaaagcgacaatctttatgatcggaaactatatcgggcataagaatcatctgactgagaagcagatgaaggagatggccgcccacggcatttccattcagagccatacgatgaaccatctcgaattgaacgggctcacaccgcagcagcagcgacgtgaaatgaaggactctaagcgtttatttgatcaaatgttcgggcagcggacgtctatgatcagctaccctgtcggacgatataataaggaaacattaaaagccgccgccgcgtcaggctaccgtatggcggttacgacggagccgggagcggcgtcaagagatcaggggctttacgggcttcaccgcgtccgtgtatcgccgggcatgtccggggcggcattcggctcttatattcaaaatgtgatgaaataacagagcctccgcatatgcggaggcttttttcagtttaatagaattgatgaagcagcagaagggtgacactcacggtaatcgctccgccgattctggtcgacacttgggcgaacggcataagctcaagccgttcagcggcgctcaagatcgcgacgtcgccggtgccgccctggccggaatggcaggcattaataatcgccgtctcaatcgggtacagattcagccattttccgatcagaaaaccgacggccatcatcgtgacgacgatagataaaatggtaatgatgttgctgatcgtaaacgccgcaatcagcttgtcccacggtgtcattgaaacgccgatcgcaaataagagcggataggtcacggctgtcgagaaaaagcgcgagacgccgaaggctccgttttcaatcgaagccggcgccagcctgaacagcttaatgagaacggcaaggacgagcatcacgacaggagccggaagctgaaagaaatcatgcgccagcatgccgactaaatagagggaaaccgctaaaataccgcccgaagcgaaaaaggacaaatcaaacgttttatcattggccggctgttccaatgcgggagcggaatgatcagacttatcaaccttcccgttgcccgtccattccggtttgcgtttcccgatgacattcagcaaacccgataacataatggcgcacaggctgccgagcatgatggacggcagcacaagcgcaaaggcgtctccctgggacatcggcataatatcggagtagccgatggataaaggaatcgcgccttcaccgacaccccccgccataatcggaacgacaatataaagcagtgtgtgctgaaagccgagcccgagaagcgtcccgacgcataagccgacgatggcggccgcgatcgagccggcgatcagcggaataaaaatcttgacgaaagctttgacgagcgtctctcttttcatcccaagaatactgccgacgacgataccggcaataaataaatagagaaagttggagctttctgtgaattctgttgttgaagtaataatgtctttcggaagcaggtggtagtagacgacagcggatggaataaaggttgcgagaatcgcagggccgccgatggaacgcacaatcggaatggattttccgatctggccgaaggtaaatccgaaaaaactcatgacggcaattgatgtcagaatgtcgcttttaacatcacggctcatgacaaacaccgtaataagcaagaaaagcaggatatagataggaagaggaataatgccgattcttatattcattgctctggcaaaccagttatcagtccgttcctgtttttggattgaatccgtttgcaattttggttgaagttctcccatgcttgttcccccagtcgttatgtagtgaaaaaatatccccatttaaagtatactaaaaaatttaaattgttcatatattatgaatttactagggggcatgctttcttcacattttctttctcaaaatggcgatttggcgggctttttcaccgagaaaagcattttgttcgccacacgaataaaaaagaggtacgatatcaaagggacaaatatcctaggtgctgacataaaatctctacaaatccgacaataatcggtcacaatttcagccttattttaggtatattgatctttttttttaggctgaatcgttgtaaagtaatgatattgaatcatttctatgacagccgctgtcccccagggtgtacaggctgatatttcaatagttttgacgaatttgtgaaacattgagcaaatatatcattttttgtgaaataccgagcaatgatttcgctatgtttgtgaaatgttgagcaatttaccagattggaggaaaaacatcatgagtgagttggtattagcccgcattcaatttgcatctacaacattgtttcacttcttgtttgtgcctttgtctatcgggcttgtgtttatggttgctttgatggagacgctttatgttgtcaaaaaacaagagacctatctcaaaatggctaaattttgggggcatctctttttaattaacttcgctgtcggcgtcgtcacagggattcttcaggaattccagttcggattgaactggtctgattattcccgttttgtcggagacgtatttggggctccgcttgcgattgaagcgcttttggcgttttttatggagtctatttttatcggattatggattttcggctgggaccgtttatctaaaaaagtgcatttgctttgcatttggcttgtatctttcggaacgattatgtcatctttctggattttgacggcaaactcattcatgcaggagccggtcggctttacgattaaaaacggccgagcggaaatgaatgatttcggggcgcttttgacaaaccctcagctttgggttgaattccctcacgtcattttcggggcgcttgcgacgggtgctttctttatcgccggtgtcagcgcatttaaattattgaagaaaaaagaagtgcctttcttccataaatctttcaagctttcgatgattgtcggtctgatcgccggtatcggcgttgcgttcagcggacatatgcaggctgagcatttaatggaatcgcagccgatgaaaatggctgccagtgaagcgctttgggatgacagcggtgatcctgccgcgtggacggcttttgcgaacattgatacgaataaagaaaaaaacacatcagaaatttcaattccttacgcactcagctacttggcttaccagaagttcagcggcagtgtgaaagggatgaaaacacttcaaaaagaatataaaaaaacgtacggaaaaggcgactatatcccgcctgtcaaaacgacgttctggagtttccgcattatggcgggagcgggcgcgcttatgatttttgccgcgattgccggctttattctgaaccgccgcaaaaagcttcatacgagcaagtggtatttacggggcatgatcgcgctgatcgcattcccgttcattgcgaactctgccggttggattatgactgaaatcggccgccagccgtggacggtcatggggcaaatgacgaccgcacaatccgtttcgcctaacgtaacgacgggatctctgctgttttcaattatcggcttcggcgtcatgtacttgattttaggcgcgctgcttgtcttcctattcgttcgtgaaattaaaaaaggtgcggaccatgatgatcacaaggatgttcctgtatcaacggatccgttcagtcaggaggtctaccatggggtcacttcatgatctttggtttgtactcgtttcagttttgtttgtcggatttttctttttagaaggttttgacttcggtgtcggcatttcgacccgatttcttggccataatgaattagaacgcagagtgctgattaacaccatcggcccgttctgggatgcgaatgaggtatggctgctgacaggtacgggagcgatcttcgcggcattcccgaactggtatgcgacgatgctgagcggatattatattccgtttatcatcatccttcttgctttaatgggacgcggcgtggcgtttgaattccgcggaaaagtgaatcatttaaaatgggtcaaaacatgggactgggtgattttcttcggcagccttatcccgccgtttgtattcggccttatcttcacaagcttgttccgcggcatgccgattgacggccatatgaatatgcatgcgggtttttcagatattgtgaacgtgtattccgtccttggcggagcagccgtcacccttctttcattcctgcacggtttaatgtttatcaccctgcgcacgatcggtgatttacaagagcgtgcgagaaaaatggcaaaacgcgtaatcggtgttatctttcttgttgtacttgctttctttgcgatgtctgcatacgatacggacatgtttacacgccgggcaaacatcacgattccggtattcgtgctgattgtcatctgcaacgttcttgctgttgtgttcatgagcaagaaaaaagacggctgggcattcggtatgaccggcgcgggtcttgctttgacagttgcgatgatttttatctctctgttcccgcgcgtcatggtcagctcgctgaaaagcgcgtatgacttaacagtagctaacgcgtcttccggtgattattcacttaaggtcatgacaattgccgcactgactctgctgccgtttgtcatcggcagtcagatctggagctattatgtcttccggaaacgcgtcagccataaggagcctatgacttattaatgggaaaagacctgtttctttataaaggaatgaagcggattcttgcgatcattacgggattaacgattatacaaacggctgccatcatcttgcaggcggaatggctgagccaggcggtaaccggattatttaacgggaagcggattgcttctctttatccggttatcggctttttcctgcttgcgtttttggtccggcatgcggtgacagcggtccggcagaaaatcgtgtaccaatatgccgcgcaaaccggcgcagacgtaagaaaaagatttcttgagcaattgttccgtctcggcccccgctttgcgaaaaaagaggggacaggccggatggtgacgctggcgatggaaggcatcagccagttccgccgttatttagagctgtttctgccgaaaatggtcagcatggcgattgtgccggcggccgttgtcatttacgtgttttttcaggataaaacatcggcattgattctgattcttgcgcttccgattttgattgtatttatgattctgctcggacttgtcgcacagaaaaaagctgatcgccaatggaagtcctatcagacgctttccaatcatttcgtggattcgctccgcggactggagacattgcggtttttaggattaagcaaatcacacagtgaaaacatctttcatgtcagtgagagataccgcaaggcgacgatgagcacgctccgggtcgcgtttttatcatcattcgccctggatttctttacgatgctgtcggtggcgacagtggcggtgtttctcggcttgcggctgatagacggacaaattctgctcgggccggcattgaccgcgctcattctcgcgcctgaatattttctcccggtccgcgaagtgggaaatgattaccacgcgacgttaaacgggcaggaggcggggaaaaccattcaagcgattttggcgcagcccggttttaaagaagaaaagccgctcgaacttgatacgtggactgacggggatgaattacagcttgcacgtttgtccgtccgagaatcgatgtctgaatttcatctgtccttcaaagggaagaagaaaatcgggattatcggggaaagcggtgcgggaaaatcgacactcattgatgtgctgggcggctttttagagcctgcgtccggtgagatcaaggtaaacggtgaatcccgctcgcatctgcagtcggacggctggcagaagcagctgctttatattccgcagcacccatacatttttgatgacacgcttttgaataatatccggttttatcatcctgatgcttcgcgtgaggacacggcgcaggccgctagatcggcgggtctttccgaactgatccgtgatctgcccggcggtcttgacggccggatcggcgagggcggacgggcgctcagcggagggcaggctcagcgtgtcgcgctggccagagcctttttaggaaaccggccgattctcctgttggatgagccgaccgctcaccttgatattgaaacagaatatgaaataaaagaaacgatgaaagacctgtttgaaaataagcttgtttttctggccactcaccgtcttcactggatgcttgagatggacgaaattatcgtgcttgatgacggcgcggtggcggaaatcggcacccacgacgaattgatggcgaaacaaggcgtatacgccaaacttgtaaaggcgcaactgggggaaagaacatgagaaaagaagaatggattctgccgtatatgaagcaaaatgcccgtttgtttgttcttgtgatttttttaggcgcggtgacgattttttcggcggcctttctcatgttcacttccggttttttgatctctaagtcggcggctaggcctgagaatatcctgctggtttacgttccgattgtagccgtgcggaccttcgggattgcccgttcagtctcacggtacgccgagcgtctgacggggcaccatatcattttgaaaatcgtgtccgacatgagggtgcggctttacaatatgctggagccggcctcgctcatgctttcatcccgttttcggacgggcgacatgctcggcattttggctgaggatattgagcatttgcaggatgcgtttttaaaaacgattttccctgcggtttccgctttgctgctgtatgcggcatccgttatcggactcggctttttttcctggccgtttgccgcttttgcggcgatttacctgtttatattggttgtattgtttccggttgtgtcgcttcttgtgacgagagcgaaaaacatgaggctgaaaagcggccggaatacgctctacagccggcttacagatgccgtgctcggcgtgagcgactggatgttctcgggacgccaggcggcctttatttcctcttatgaagagaaagagaaggcatggtttgatcttgaaagcaaacgtcagcggtttacgagatggcgtgatctcgccgcgcaatgccttgtcggcggcttcatattgatcatgctgttctggacggcgggtcagtatgcggacggcagcattgccaacacgatgatcgcggcctttgtgcttgtcgtatttccattgacggaggcgtttctgcccctttcggatgcgctgacggaagtgccttcttatcaggattccatcaatagaatgagtcaggcggctccggagctgcgaagtcgtgaggtgaagcagacagatgagaaactggatgtatctgatgtgacacttacatttgataacgtgacgttttcttatgatcagcactgtcatgtgcttgaccgtttttccttcactctccgccaaggtgaaaaaatggcgctgctcggcaggagcggctccggtaagtcgacctctctcgctttaattgaaggcgccttagttcccgattcgggcaaagtgatgctgaacgggctggaaactgcggccgtgcaggagcagatttcctcagcggtggccgttttgaatcagaaacctcatctctttaacacgagcattatgaacaatatccggctcggaaacggcaaggcgagtgatgaagatgttaagcgtgcggctcggcaagtgaagctgcatgattatattgaatcactgcctgacggatatgaaacgtccgtgcaggagacggggattcgtttctcaggcggggaacggcagcggatcgcgcttgcccgtattctgctccaagacacgccggtcattatccttgatgaaccgacggtcggccttgatgcggtcacggaacgcgaattgcttgatacgatttttgatgtctttaaagagaaaacgatcctctggattacacaccatttagcgggtgtggaaacagctgataaaatcgtctttttagaaaatggaaaagcagaaatggaaggaacccatcaagagcttcttgcagaaaacgaacggtaccggaagctttaccgtcttgatgttccggtcagaacataaacagccgcaaacgagcggctgtttttttgtgcggtttaaaatctcttcttgtttggaatataaataggagacagaagaggaggtacagagatgaatataatggattggacggaacaggatgtgaaagatacgctgccgaagcgggaggcagacagccataaggggacgttcgggacggcgttattgctggccggcagcgaagacatgccgggagccgcccttctggccggattgggcgcgatgagaagcggtgtcggcaagctcgtcatcggtacatcggcaggcgtcatcccgcttatcgtcccggtgctgccggaagcgacgtactggcgtgacggctggaaaaaagccgcggcgggccagcccggggaaaccatccgggccgctgccatcgggccgggccttcctcaaacagacgaagtgcagcaggcggctgatcagctgctttctgccgattatcccgtcatactggacgcgggcgccattacgaaaagaacctatccaaagaggaaagcccccgtgatcttgacgcctcatcccggcgaattttccagaatgacaggccttccgattcaagagattcagcagaacagagcgggatatgccgcagaatgggcggagcggcttcacgtcacgattgtcttgaaaggaaacgaaaccattatcgcttttcccgacggggaatgccgcaggaatacaaccggaaacggcgcgcttgcaaaaggcgggaccggcgacacgctgacgggaatgattctcggcatgctgtgctgtcatcaagacccgaagcatgccgtattgaacgccgtccgccttcacggtgaatgtgcggaggtatggacgaaagagcgctccgcccataccttattggcgcacgaactttctgaactgctgccgcgtgtatggaaggaatatgaataaagaaaaggcgtcttcatagagaaggcgcctcttgttgttttacccttgatttcatcaggacataatacagcagcgacggaacggccaggccgatgacccaggcaatgtcgcctccgccgaatatttcagcgagcggcccgatgtaaaaggatgtattgatgaacgggatttctaatataatcgacaaaacgaaggcggccgctgtaatccaattgaccctgccgtattgcccgttgacgtcaaacatcgatttgacgtggtattttccgcggcggataaaatagtaatccacgaggttgatcgccgtccatggaattaagaaataactgatgaaaaagatgaaatttaaaaacagttccatgaaattgctttggcccaagagacttaatacagtacctgctgccgtcacacaaagaatcattaccactctcgttttcggcgtcaccttcagttttaaaaacggctctaaggtagtcgtcgttgacataaaggctccgtataaattaaagacgttgatcgccatttgcccgaacaggacgatgatcagcataataaaggaaaacggaccgaacaatcggacaatctcatttcccgcattagcggtaaattccgggagcgccgtcgtcaaaatggcgccgagaagcatcatccagatggaactgactgacgtacctgcgtagctgtaccaaaaagtatgcgatgccggtgttttgaccggcagataacgggaataatctgcgacatatggcgcgtatgccagctgccatgtggccaccgcgctgaccgccactagaaaaacaggcagatctaatgagccgggcacccagcttcctgaaggaatcggcagttgaaaaataagaatcgttgcagcaaaaaaaacggcaaaggaggtccaagagaggattttctgcattttgtgaatcagatcatgaccgtagatcgtgagtaaaaaacagatggcgcttaagccgataatacaccatgaagccggaatcggtacaaagctgctcagtgtaccggctgcgagaatcgtactgctcgcaaagaagcccaggtagataaacatgaccaaaaagaggggcagaatcgccccgatcacgccgaattgcgcgcggctttgaatcatttgcggaattccgagctgaggtccttgtgcggaatgagacgccataaagattgcgccgataaaggtcccgataataatggcggcgatactccaaaagagatcgagtcccattgtaacgggcagtgtgcctgtgactaacgtcgtaatatgcatattcgccccgaaccagacggggaataaatctttagcctttccgtgtctttcgtcatgcggaatatgttcaatcgttcgcctttctactttcaatagataatctcctccgtatgttcttctttaacataaagacatagcttaacagattgacctgccgtttacaaattccagcatgcaggaaaaacattgtaaagcctcgctgacagccgtcaaagggttttttgaaaaacggaacaaacactgccgccaaaacgatttgccagggtttaaaaggcatggatatgcttacggactaatatgtattaaggagaaatgtgtcaatcttttgacgaatggagccattattcgttaagctgaaagaatagtttactttgtgtaaatttcattaatgaaaaggggattgatgatatgtgtacaagtcttacattgaaaacgacagacggtaatcacctattggcgcgaacgatggattttgcatttcagctcggtacggacgtcgtgctttaccctcgtcagtacagctggaaaagcgaagctgacggcaggatgcataagacgaaatacgcatttatcggcatggggagaaatctcggcaatgttctgtttgccgacggcgtaaatgaaaaagggctgtcgtgtgcgacgctgtattttccgggctttgcgggatacgagaaagcggaacgggagggcacctgtcacattgctcctcatgagtttgtcacctgggccttatcaaactgtgaatctcttgaagacataaaggaaaagctctcaatgctgacgattgtagagaagaagttaatgttattggatacggtgctgcctcttcattggattttatcagaccgcacgggcggctgcattgtcatcgagccgacaccggagggaatgaaagtatatgacaacaaacccggagtgatgaccaatagtccagaatttccttggcatgtgaccaatctgcgccattatatcggaatcaggccgcagcagtcagaaagcaaaacattgggcggaatgacattaaccgctttcggccaaggatctggaacgatcgggcttcccggtgattacacgccgccatcccgattcatcagagccgcttatctgaaagagcatttagagcctgctgctcatgaaacggatggcgttacggccgcttttcacgtgctgtccaatgtgaatattccaaaaggcgcggtgatcacagaggagaatgaaattgattatacgcagtatacgtcggtcatgtgctgtgacaccgggaactactactttcatctgtacgacaaccggcagattcacaaagtaagtttattccatgaagatcttgaccgtccggagccgaaagtatttgcggccgcggcggagcagaatatacaggagctgaattagctcaaaaaaaaacaggacgcgattgtcctgtttttttatttaatacggatcagacggatggctttcctgttcagcctgttttgcggcttgtgctgtatcagtagtgccgatcggcccgccgctgttgctttcggaggcttttttcagcccttccgccacacgttttccgtagtccggatctgcttttgtgaaattctcaatcatttgatcctgaatgtctttccggcaggaagaaagcgtattgaccaggtttgtgatcaattcgttccgttcaaattccgaaaatctgcggtatgtttctccggcctggccgaagttattcgaccggtcgatcgcttcccgcttcacatcgccttcgacatgaggtgtatggtctttcccatcctgctttgcttcgttgagtcctcccataacggacggctcatagttgacgtgcgggttttgtccttctgcccgatcgacccgatactgcatttgcccgccttcctggttggtggcgacatgctttttcggcgagttgatcggaagctgcaggtagtttgcgccgacgcggtaccgctgggtatctgaataggagaatgtccgcccctgaagtaatttgtcatccgaaaaatcaaggccgtccacaagcacgcccgttccgaatgacgcttgttccacctcggcatggtagttttccgggtttttgttcagaaccaatttaccgatcggcttccaagggaaatcgtctttataccacagcttggttggatcaagcggatcaaaatccagctcggggtgttcgtcatcagtcatgatttgcgcatacacttcccactcagggtaatcgcctttttcaatcgcttcatacaaatcctgtgtcgcatggttaaagtttttcccctgaatctcttccgcttccttctgtgtcaggttgcggatgccctgtttcggttcaaagtgatatttgacgagcactgcttttccttcttcattgacccatttgtaggcatggacgcctgagccctgcatctgccggtagttggccgggatgccccacggcgaaaacaagaatgtgatcatatgagtcgcttccggtgattgggaaatgaagtcgaaaatacgctcgccgtcctgaatgttcgtaacgggatcaggctgaaatgcgtgcacaagatccgggaacttcagcggatcacggataaaaaagattttcaagttgttgccgaccagatcccagttgccgtcttcggtataaagcttaacggcaaaaccccggggatcacgcaatgtttccggggaatgctttccgtggttgacggtagaaaaccgcacaaacgccggagttttcattcctttcttttgaaacactttcgctcttgtgtatgtagaaatctcctcgtctccaaaacttccgtacgcctcaaagtatccgtgtgcgccggcgccgcgcgcgtgaacgacgcgctcgggaatccgttcgcggtcaaagtggctgattttctccaaaaaatcataattctccaatgtcgtcggtcctctattgccgactgtcctgacattctggttgtcagtgaccggatggccctgccggtttgtcagcgtgtcttctgactcgcctttaccggtcgtcttactggaaagcgtttcttcgctgtttttgttattttccattgttgaaccctcctttttgaacggtaacaatatgcccagcagagccgtttcttaaaaccgattttcaaaagaagcagttattccgtgatcggcgtcaaggacccgccgttccatatttcgcccttgttcagcgtccagctgttttgataaagggcctgcgcgccttggttggccgccggacttaattgttcatcccatgtcaaaaagtacgtggtctcgggatacttttgcctgatcgcattgataaaagcagcataatcaaagcttccgatattgccggacggaccggtttcggcaaaggcaaacggttttttcagagacagcatttcatcatagcctgatatcgcatacggatcagtgaagtaagcgtccagaccggtaatatccacataagatgagcctgggtaaaagtctgtcttaaagtctctgttggcatccggcgaatacacccacaaaaggttatccaaccctcttgtctctgtcatatagcggtatatcttcttgtaaagctctttgtacagcgagattctctcattgtctttttggttgtagcctgtcagcccccaccagaaccactcgccgttcatttcatgcagcggtctgaacagaacggtgacgtcttgatttttcagctgagtaaggccgtcggcgattttgctgagcagcgcctcaagccgttttccttcaacagttgaagggtccagaatgtttttgtactggctgtttgagatggccgttttatagtttccggatggaaaagccggatttgcgagatgcaggctgacctgagggaggccgccgcttttccagtatgagattaagctgctgttgcagctgtaatcgatagaatcggtgatatccgctgtttcaagccatcctctcccatagtcacagccgtagatggcgggagactgtcccgtcgcgtttttcaagcggttttcctctgtcattgaaaaagtgacatcgctgtacccgccgaacgccccggacatgaccctgttttctgaacggttgggcaggtgcgccagccagttcatgatatcttttgtcgtctgctgggcatttgggttgacgggataaacggtgtgagccgatatcggactggcggctcctaagagtaataaaacgatagacaggcagactgctaactttttgagcatataaaagacctcctgatttttaagatgatgaaggatgtgaaacgataacctcacaatctccttctataacaaaatctccggaatccgccggcacgataaagtgatcgcctttgtgaatggggcatccatccagttctccgtgtcctttcatgacgcttgcgagtaaataccggccgggtgcggggaatgatgctttcccgctcacatcccattgataaactgaaaagaaaggtgtttcggcgagtatcgtaataagagcatctccgatccgatgctttgtgctttttacattttcatcggtatggggaatgtctgttacgtcaattgctttctgaagatgaagctcgcgtttattcccgttcccatccgtccggtcatagtcgtaaagccggtaggtggcatcagagctttgctggatttcaagaacgagcgtaccttcacataaagcgtgcagtgtgccgctcgggacatagaaaaaatcgccgggcttaatggggatgcggcggagcaggtgatcccactcgttttgttcaatgagccgaacgaagccttctctcgtttgggcgcgatgccctaaaatgagctccgcgtcttttttgcagtccaacacgtaccagcattccgtttttccgagttctccgttttcatgccgatgtgcatatgcgtcatccggatgaacctgtacggataagtccatatttgcgtcaagaatttttgtgagcaggggaaaagcttcttctttcggatgtccgaacaggtcagggtgttcactccagagacgctgtaatgatgttccggaaaaaggcccgttccgcacaatggatgtgccgtgcggatgagctgaaatcgcccagcactctcccgtccgctcagaaggaatctcatacccgaatgtatcgcgcagcttcgtcccgccccataatctttctttaaaaaccggttccaaaaataagagtttcgtcatttttccgcctcccggtttgccgcctttaatgcgcgctccgccaatacgagcgaaccggccgcgccggagtgaatccctaattgagggggaacgatgaagtgttcaatgtcgggcagatcaatatattgattcagccgctttttcacgtgctgacggatagaagagaacagctgccgctgcttcatgacgcccccgccgagaatgatcttttccggcgaaagtatgagaatatactgcacaagcgcttcggcaatataatagccctcaagctcccacacttcctgctgatccgtgagcaaaaatgcttttttcccccagcgtttctcaatggcggggcctgccgcgaggccttccagacaatctgtatggtatgggcaattgcctttgtagccgtcgtccggatgtcttctgacataaatgtggcccatttcaggatgagacagcccttgaacaaatctgccgttcatgatggcgcccgcgccgatgcctgtgccgaccgtcaaatagaggcagctgtccgcgtttttggccgcgccgaaagaagcttctccaagcgccgccgcattaacgtcggtggtgaagcctgcgggaatatccagagcgcttttgatcgtttgaagaatagggcagttccgccaggctgtcttcggcgtcgcggtgatgcacccgtatgtttgactgtcaggacggatatcaatcggtccgaacgacccgatgccgatggcttctatcgggaaatctttaaagtaacggatcacctgtctgagtgtgtcatccggttctcccgtcggaaactctactctgtccagaatggtgccgtctctttgtccggcggcacagacaaatttcgtgccgccggcttcaatacctccaagcatggccgtccctcctcatctgttaaaatccgttttgatcggaaacggatttgaaccagcggccgctttttttgacggtccgttcgcccccgttttccagattgacagatacaaagccgtagcggtttttataagcatttgtccaagaccagttgtccatgaaagtccacaggtgatagccttttacatttgaaccttctccgatggcccgatgcacccatttgagatgttcctggataaattcaatcctgtaatcatcctgaatgatgccgttttcatcgcggaagcgttcctcgccttctacccccatgccgttctcagaaataaaacactcgatatttccgtaatgttctctgagattggtgagaatgtcgtagattcctttttcataaatttcccacccgcggtgagggttcattttccggccgggcatgacatacgggtcgaagaaacgctcaggcaggaaaggggcatgcggattcggaacatgttcttttgccttgacgcgcctcggctggtagtagttcacgcctaacaggtcgaccgtatgctcctgaatgaggcggagatcttctttctcataatgcggcagaaagccttccgccttgagaatctcgacaagctcctcaggaaattcgccctttacggcgggatctaaaaatgaacggttgaaaaaggcgtcggcaatccgggacgctttgatatcttcaggatgtgagcttctcggataagaaggcgtcagattcagaatgattccgatttgtccatcctgtttcaattctctgtaggctttgacagcccttgcattcgacagcagggtatggaagccggcctgcaccgcttcttgaaaattaacgtgattcgggtagtgaaagtcgtataagtagccgccttcaatcggcacaatcggctcgttgtgagtgaaccattttttcaccttgtcaccgaatagcgaaaagcaggttttggcgtaatgttcaaacgcgtcaacggtgttccggctgacccagccccccttacgctgaagggcgagcggcatgtcaaagtgaaacaaattgacaaacggctcaatgcgatgggcaagcatttcatcgatgacgtcctgataaaacgcgaccgctttctgattgacctcgccagttccgtccggaatcaatcttgaccaggaaatagacagccggaaggagttatggccgatttctttcatcagccggatatcctccttgtattgatcgtaaaaacgtgacgtgtcgccggggccgacgccgttaaaaaaacggctcggctctttttcataccagtaatcccatatgttttggctttttccgtctctgtcagcggcgccttctgtttgggtggcggaggcggaagacccccaccagaatccttccggaaaacgatattgaatatttgattcagtcaattggtttctctcccttactgcgattttgattacatactcatgctgtcatcccgggcatgctgctcggtctcagcttctttttcctttgccatgtttaatttgtccagcgctttaagaaacgggaaccagatgacaaacacaatacagaggttgaccagctgcataatgccgcccatgacggaattggtcgccataatcccgttaatgaaaagggggacggtccaaggcacggtcacgccggtaggagggggcacgatccccgccgacatggccaggtaggtgacaagggtgacaaccatcggtgcgatcacccacggaatgataatgatcgggttcatcacgatcggcaaaccgaaaataaccggctcattgacgttgaaaatgcctggcgcgagaccgagtttggatatctgtttcatctgtttgcttttcataaaaagcaagatggcgatcactatggccaatgtcattccggttccgcccattccgacggtgtaaatctccataaacggcttagaaataatatggggaatctcttttcccgctgtatacgctgccaaattttcgacctgtaatgtattccaaatcgggtccatcacggaattgataatgatttgtccgtgaagtccgaaaaaccataaaatctgaataaagaaaacagcgattaatgtaggaatgatgccgcttccaagtccgacaagcggtgcttgaaccgtatgataaatgacatcatgcagattggtgtgaaagatctgggtgacagccgcattgatcaagaggaagacggtaagcgtgataaaagccggaatcaatgcggcgaacgatttagcaacagccggaggaacaccggcaggcatcttaatcgttaagtttctctgaacgattcttctgtagatttcacctgacaaaaacgcggtcatcatgccgagaaacatcccttttgctccaagccggtcaaccggaatgacgcctgcgaccgctttgcccgtttccggctctaaaacgaacggggtgagcagcagaaaagaaaccaatgcgatcgctccgccgaatacggcctccacttcgtagcttttggaaaggtaatagccgatcccgaagacgacaaaaatggacataatccccatcgtcgccgtcgaagcgccgccaaatccggattgaaagacagacagggcggagctgctcatgattttgtttaaaaacggcaggttcgtcagcacgacgaacaccgaaccgaaaatggtcagcggaaacgccagcataaaagcatcccgtaagacttgcaagtagcggttattgtttaatttgcccgcgatcggaacaaggaattggctgattttctcaaacacgtcttcacccccggctttttataaattctttgattgaaataaatcgagcatttctttgacgagctctttcattgaaagcgctgacattaagtggtcttcagcatgcataaaaagcagagagacatccgtcttggcgccgccggcttctttttgaatcatctgaaaatggatgtcgtgcgctttccccagttcttcttcagcctttgtcagaaaggtgtctgactcatctgtccggccgtctttatatgcgcgtatcgattgaataatattgctgcgggcattgccgctgtgaagaatcagctgaaaactgatctgttcatccgtgtacgtttccatgcttatcgcctcctttatttgttctcaatcaaggcaacggcctgttcgtatgcttttttgccatctcccatgccgtatgccatcatatcaatcacatcaacggtgatgtgaagcgggtccgcctctttctgaagctcaccttttaaaaaactcatctgcgggccgatcagtacgacgtctgcatctttcatcgcttcttttgctttatcctgtccgactgcccaaatctcggcttcctcaccgatggagcgggcgtaattctgcattttcgtaacaagaaggctggtggacatgcctgagctgcaggctaataaaattcttttcatgaggaatcccttctttcataaagttaaaacgttttcatgaatattataatcttttgaaattaaatgtctatacttttaaaatataaagttttacttttcggatttttgacacaaaaaaaccttttaagattcaacttaaaaggtttttcatctcaagcgagccataacagccataaataaagtccgatcaaggtgatgaataacgtcggaatggttaatatcagacctgtcttgaaatacattccccaggaaattttcacgtttttccggctcagcacgtggagccataacaacgtcgccagcgacccgatcggcgtgatcttcggcccgaggtcagaaccgataacattcgcgtaaatcaatgcctctctcatcagcccgtgagtgtccgttccgctgatggctatggcgtcaatcatcaccgtcggcaggttattcataacggaggagaggatcgcagcgataaaacccattccgagtgtgcccgcaaacaatccgtgatccgccgctttctgaataagctgagaaagaagatccgtcagtccggcattccgcaagccgtacacgacaacatacatgccgacagaaaaaaacacgatggcccacggggcgtccttgatgacttgtttcgcagggacggcggggcttcgctgggccagaatgagaaaaatgaccgcgatggagccggcaacgaaggaaacgggtatcgacagcagttcgctgacgaaatatccgatcaataaaacggccagcacagcccacgataaccggaaaaggcgttcatccttaatcgcggatgccggatgtttcacaagaccggtgtcataccgtttcggaatgttttttctgaaatagagatacagcaccaaaatgcttgccgccagagaaaaaaggttgggcaccagcatgcgtgatgcatattcaatgtatccgatatgaaagtaatcggcggatacaatattgaccaaattgcttacaacgagcggaagcgaggtggtgtcggcgatgaatcctccggcgataataaaaggaaaaaccagcttttcaggtaaattcaaagcccgcaccatcgccagtacgatcggggtcaaaatgagcgccgctccgtcattggcaaacagggcggagacaacagcccctaagaccgacacatagagaaacatccgcagcccgctgcctttggccgccatggccatatgcagcgcggcccactcaaaaaaaccgatactgtcaagaatcaatgaaatgataataatggcgataaaggcaagtgtcgcattccagacgattcccgtcacttccgcgatatcgtgcaggctgactgctccggcgatcaaagcgaggaccgctccgccgcaggcagaccagccgattgatacatgtttcggctgccatatgacaaacacaagtgtcagcacaaaaatcagcgctgataaaaccgcaactcccaagaatatatcccccttaccggcatgtaacagtgacttctttttgccgcaatgtctgtaaaacttcgtccttttcatctatctgctgcagaatcgagcaaaccagcgcgtattccggaccggacggatgaatggcatagtaccgccactgaccctcgcgtctttcccgcacaaggccggcgttctttaatttccgcaagtgctggctgatgccgggctgacttatatgaaaaatagctgtcagctcgcagacacaatattccttatccttcagaagcttcagcatcaaaagcctcgtcgggtcgcttagaagtttgaggcactggctgatcccttcggaacttaaagcatgatgcctccgttccatgcgctcactccttttttacactattatataagcagatgtttatataagtaaacgacaatataaaaaagccggccttgcactttttgcaaaaccggctcgtgtttatttttggaacagttttttcgcttcatccattgctaatttatttcccagtgctgaataatcaagccaaggctgatcggcaattttatagacgtggtttgctttcacggccttcagccctttccatacagcgcttttttgcaattctttataggcttgctgtgacttgtcgtctctgttaacgacgacgaaaatcgcatctgcgttgtaatcaggcagcacttcttgagaaatgacttcataagggcgggaggtgttcatttctttaatgccgtcagccggtttcagcttcagatcgtcaaacagaatcggtcccatcggacggcgtgtgctgaagacgcgaagctcttttgcgttcacgcggatcgccatgactttggcgtttttccctaattccttattcatcatggatctgacttgttttgtttcatcttcgtaatcttgaataaatgttttcgcttctttttcacggttgacgatttttccgatgtcttttaaatgatcgcgccatgtgcctttatcaaggtcgaaaacgtgtgtgtttccgattttcttgtattttgacacatcttttcccgcaaattctttatcaagataaatgttgtctggattcagctcaagtaaagcttccatatccgggtctgaggcaggtccgagttttttcgtgtctttcagctgatttttcacatgagggagaaaatcttttaattctccgcccacgacggaaccggcaggtgtaacgccgagagccagcagatcatttgtcaggtgaatggacatcgaagcgattttatgatcgccggatttcttttttgactccggctgtgttgaatcggattggcaggcagccaataagaaaatacacatgaaactgatgagcgcaattatttttttcatgggaatactccttgttttatgatttgattttcatgacgagatagagaaaatacggcgcgccgatggctgccgcaaccacgccggccggaatggcgttcggctgaaacaatgaccggccgatggtgtctgccgcgacaagaatgacaagtccgattaatcccgcaatcgggataatatgctgatgcatggtgccgacgagccgtcttgccaagtgaggggcggcaaagccgataaagccgattcccccggccatcgcgacgctcgcgcaggacaagccgaccgctatggcgatcagcatgatcctttttctctgcacgtgtgcgccgagccccgcggctgcctggtcaccgagcattaaaatattcaaagagcgggcgttaagccatgcaagcggtgcgagaatgccgatccagggcaatagcgaccacacgtgaatccaatccctgccccagacgtttcccaccagccagcgggaagcgaatgtataagtttcttcattcagtcgcagcgacataaacaatgtaacggcgctgaagcccgcggaaacggcgatcccgactaacagcatgcggatcgttaaaaaaccgttcagcctgtcgtacgtaagcactacgatcagcagggcggcgagtgttccgcccgcaaacgtaaacagcgggatgaacatcgatgcctgcgcctccagggaatgaaagaacgtgatatacatcatcaaaccgaaggaagcgccggcatgcagtccgagaatgcccggatcggcaagcggatttcgggatacaccctgcaaaatagcgcccgacactcctaaaccgatgccggccagcatcgtcaccagaatccggggaagccggtaatcgaataaaacggttgtgctttgaaacgtgccgtatccgaacagcgtttttcccaccgtgagaggagaaagccggaatgagcccgtatgcagcccgatcagaataatgcaaacggcgatgaccagcagaatgagtcctgccgccgccgctttttttgtttctttctgcactttcatttataagtctctcccttccttgcgggcaatataaagaaagaaagggacaccgacaagtgcgaccataatgcctatcgccaattccctcgggggactgaccgtgcgcgaggccaggtcagccaaaatcaatagaatcgcgccgagtaacgcggacatcggaataatcagcctgtacgtaacgccgacgatctttcgcgcgatatggggaatgaccagcccgacgaagccgatcgcgccggcagcggaaacagacacaccggcaagaacgacggcgatcattaatccggcggcacgcgtcagagccgtgttcacccctaaattcgccgccacgtcatttcccattgagagaagggtgacggaccggcccatgaatgtcgcgagaatgatgaagaccgcaatcacgggaacaaggacttgtaaatgagcccacttgatccctgacaccccgccggcgtaccagaaggccaaatcctggcttaaatcgtaataaatcgccacaccggtactgagtgaatgtaaaagagcggctacgaccgccccggcaagcgttacttttaaaggtgtcatgctgccttttcccgccgcactgataaagaaaatcaagccggtgcttgccagtgctcccaaaaatgacatcaccatcagcagggcgtatgataaatgagggaaaaaagcaaaactgagcgcaacaacaaacatggcgcccgcgtttacgcctaagacacccgaatcggcaagcgggtttctcgtgacaccctgcatgagggcgccggctgcggcaaaagcggctcctgtaacggccgccccgagcaccctcggaagacgcaattcatgaatgatctgctggcccgttatattcggattgtaatcagcaacagccgaccaaaccgtatgtaaagtaatgtctttcgcaccgaatgagacggcgaaaaaaatagatacaagcagcccgatcacagcgatcaggaagaaaaccccgttttttaagatgctgatcagacggtttgcggacctgacagaatcgctcaaaaatcaattcacctacttttatgatcattatccggtatttattgaatatgagaatcattttcatttgaaccatcatattataccgagccgattttcaaaacgcaatagagcgttcaacaatgatgtcctttttttctctcatgtttatattgtaaaaaagaagtgaaaaacgtgaaagaggaaatcgctatattcagaaaggagggaggcaaatggcgggagaacaaaagcctttgccgattgaattttaccagagaccgtcagtggagcttgcccctttattgctcggctgtctcttggtgaaggagacggatgagggaacggcttcaggttttatcgtggaaacggaagcttatatgggagcggaagaccgggcggcgcacagcttcggcaaccggcgcacgaaacggacggaaattatgttccatgaggcgggccgcatttatacatacgtcatgcacactcatacattaatgaacgtcgtcgccgcggacatcggcattccgcaggccgtgttaatcagggcggcggagcctcatgaaggacagttcctgatggagagcaggagaccgggcagacccccgagagagtggacaaacggcccgggaaaactgacgaaggcgatgggcatttcaatgaacgactacggcggcatgatcacggaaccgccgctgtatattacggagggctttatgcctgagcatatatcaacaggcccgagaatcgggattgacaacagcggagaagcccgggattatccgtggcgctattgggtgacagggaaccgatatgtctcacgctgaccatgtttataaacgctgataacaggggaaagacaaggtaaaagaaaggggattcagacattgaaaaaatttttcaaaacgattatcaaatgggcgcccgtcatctatccgatcatcagaaaaatcataaaagaacggaaggcatctaagcggaaccgcatgtccgcatcccgaacagccggctgatccggctgtttttttacgggcttggcatcggattgccgcattgacttgaaatcctccccattatagaatttacatacatttaccccttcctcattctttttgcccatttttcacgtctgcatctgatctgataggaggtttttctcatgcttcatgggcggcttcgtgaacttttgcgcttgcttttagctgctgaaacaccggttacaagctcagtcatcgctgcaaatgtaaaggtaacgacgcggacggtccgcaatgacataaaggaactgcaaaccattgtagaaaaacacggcgcatccattcaatctgtcagagggagcggctataagctgctgatccggaatgagcagccgtttaaaaactggcttcaggacaatttccagcagaacagcaccgtgccgatttttcccgatgaacggatagattaccttatgaaaagaatgcttctggccgacggctacctcaagctggatgacttggcggaagaactgttcatcagtaaatccacacttcaatctgatttaaaagaagtcaaaaaacggctccgcccctatgacatcattttggaaacaaggccgaactacggctttaagctgcgcggcgaagagctccgcctccgttattgtatggcggaatacttagtggacgaccgcgagcctgagcctgatctcctgagtgaaaaggccggtattctgccgaaagacgacattcatgtgatccgcacagccattatgaagcaggttcgaaaccataagatcccgctttctttcttcggcctgaacaatctcatcatccatatcgccattgcctgcaaacgaatccggacagaaaactatgtatctctcattccggaagatcttcatgatattaagcttgaaacagaatatcagtcagcggaagccatcgtaaaagagcttgaatcggcgctttcggtcacctttcccgaacaggaaaccgcctatatcgccattcacctgctcgggacaaagcgcatgacccagtcacaactggaaggaaaagagcttacaaggctgatagacggggaaaccagccgtttgacggaggccatgattgaagccattgagcgggagctgaagctcggaatcacggacgacaatgagctgaaagcgggtcttgcgctccacatcaagccggcgattaaccgaaaccggtacggaatgaacctgagaaacccgatgctctccgccataaaggaaaattatccgctcgcatttgaagcgggagtgattgcgggaatcgtgatcaaggagcaaaccggcattgatattcatgagaatgagatcggatatttggcgcttcatttcggagccgccattgaaaggagaaagacggaacggccgcctaaacgctgcttgattgtctgtgcgtccggcgccggcagcgcacagcttttaagagaaaagctccgttcccggttcgcaaagcgtcttgaaatcgtcggaacggctgattactgcagccttgaccagctttcctttgagtcgattgattttgtggtcagcacagttccgatcaaaaaagacctgcccgttcccgtattaaaggttcatacgctgttgggcggcggggattttacaaaaatcgacgccatgctggaagaaaagcgggaacaattgaactttctgaaaccggagctggtatttttgcagcaggatctggagacgaaggaggacgtcatccgttttctcggacagcaggttgcagaagccggcctcgcttctgattctctgaccgattctatttttgaaagggaaacgatttctcctacgagtttcggcaatcttacggcgattccgcacccgctcgttccgcagacagacacgacgttttgggcggtatgcacgctgaagaagccgattgactgggcggataagcgtgtccaatttgtctgcctgctctgcgtcgagaaagaaagcaaagccgacctccagcatatgtacaaatggctcggcggcatgttagatgatccggccgcggtaagccgtctcttaaaatgcacaacctatcaggaggttttacgagtattcagagacaaacgatcagagaaagaccgggatacaccttttttccgttaacagcggaaaaagcctgagtagttatgaaagcgatttcataatatgatggtactaacatcgagacatacaaaatatcaaactttcaggaggtcttttacatgaatatattactcgtttgtgcagcagggatgtcaacaagcttactcgtcaccaagatggaaaaaagcgcgcaggaacaaggaaaagaatataaaatctgggcggtgtcaggcgattcagtcaaccagcatattgataaagcggacgtattgctgcttgggcctcaagtccgttatttgcttccgcagctgaaaaaattgggtgaatcaaaaggagtgccggttgaagtcatcaataccgtccattacggcacatgcaacggagcggaggttctgaaatcagcggaacagctcggaaacgcatcgtagaaaggggcgggccgtgtgaataaggtgaaccagtttttagaagagaaagtcatgcccattgccggaaaaattgcctcccagcggcatctgcaagcattgcgtgacgggatcatcctcaccatgccgcttattatcatcggttcattttttctgatcatcggcaacctgccgattccgggatatgcggatttcatggcaaagacgttcggaagcgcctggtctcaaaaactgcaatatccggttgatgcgacctttgaaatcatgggtcttgtcgccgctttcggaatcgcctaccgcctggccgaaaaatacggggtggatgcattatcggccggtgcgatatctttggcggcgtttctcttggcaacgccgtacaaagttccgtttctgccttccggcgccaaagaggaaatcatggtcggcggcggcatcccgctgtctctcatgggaagcaaagggctgtttgtcgcgatgatcatcgccatgctgtcgacggaaatttaccgcctgatcatccagcggaatttcgtcttcaaaatgccggacggcgtgcctcctgcggtcagcaaatcgtttatcgctttaattcccggctttgccgtcatctttctgatctggggcgcgcgtttaattgtcgaagcgacaccgtttgaaagccttcataacattgtaagcgttgtactgggtacaccgctctcgattcttgggggaagtctcggcggaagcctgatagccgaagcggttcaaatgctcttgtgggcgtgcggattacacggggcgaacatagtcggcggcgtcatggcgccgatctggttcggagcgatggatgccaaccggattgcgtttcaggcgggcgatgcgcttccgaatattttcacccagcagttttttgaaatctggatcaacatcggcggaagcggcgcgacactggcgctcgtggtcaccatgtttctccgttcgcgaagcaagcagatgaagcagcttgggaaactcgccatcgggccggccgtctttaatattaatgagccgattattttcggaatgccgatcgtcatgaacccgatgcttctcattccgttcattatcacaccgcttgtcacactggtccttacctatatcggcatgagcactggcctcgtcgccaaacctgccggcattgccgtcccatggacgatgccgccgattttctccggctatcttgccacgggcggaaaaatatcaggggctgtcatgcaggcgattaacatcatcacagcctttatcgtgtactatccgttcttcagaatgtgggattcgcaaaagctgaaagaagaaaacgaacttgaacaatcgcaggcgccagccgtacagggagacgaaaaagccgtgctgtagagaaagggagtgaaacacatgaatgaaaaaatggaacagaccatttttcagatcatcctgcatggcggcaacggcagaagcgcatcaatggaagccattgccgccgcaaagcggggggacagagccatggcggaagaaaagcttcaggaagccgcaagggaactgacggaagcccatcattatcagacagaactgatccaaaatgaagccggcggagaaaaaacagacatgacgcttttaatggtgcatgcgcaagatcatttaatgaatgccatgaccgtgaaagacttggccgctgagttagttgagatttacgaaaaagtgagtctgcaagggggagcgaaaatatgacaaaaggaattaaaattgtaacgatcggcggaggctcaagctatacaccggagcttgtggaaggcatcattaaacgctatgaggaactgcctgtcagagaattatggctcgtcgacattcccgaaggcgagaaaaaactcaatatcgtcggcacgcttgcaaaacgcatggtcgaaaaagcgggtgttccgatagagattcacctgacgcttgaccggagagaagccttgaaggatgcggatttcgtaacgactcaattccgcgtcggccttcttgaggcccgcgccaaagatgaacggattccgttaaaatacggcgtaatcggccaggagacaaacggtccgggcggtttattcaaagggctgcgcaccatcccggttattctggaaatcgcgaaagacatcgaagagctttgtccgaatgcatggctcgtgaatttcacaaaccctgccggcatggttaccgaggccttgctccgctactcgaatctcacaaaagtcgtcggcctctgcaatgtgccgatcggcattaaaatgggcgtcgcaaaagcattggacgtggatgtcagccggatcgaagtgcaatttgccgggctgaatcacatggtcttcggattagatgttttcttagacggcgtcagcgtgaaagatcaagtcattgaagccatgggagacccgaaaaacgccatgacgatgaaaaatatctcaggcgcggaatgggagcctgaattcctgaaggcgctcgatctgattccttgcggctaccaccgctattatttcaaaacgaaagaaatgctcgagcatgaaatagaagcgtcacagacggagggcacacgcgccgaggtcgtacagaaggttgagaaagaactgttcgaactgtacaaagatccgaatctcgccatcaaaccgccgcagcttgaaaaacggggcggagcgtactacagtgacgcggcctgcaacctgatcagctccatctataacgacaaacatgatatccagcccgtcaatacgataaacaacggcgcgatcgccagcattccgaatgactcagcggtcgaagtgaactgtgttatgacgaaagacggtccgaaaccgatcgccgtcggtgatctgccggtgtctgtccgcggactcgtccagcaaatcaaatcatttgagcgtgtcgccgctgaagcagccgtcacgggagattatcaaacggcgctacttgcgatgacgatcaaccctctcgtcccgtcagactccgtggcaaaggccattctggatgaaatgcttgaggcccacaaagaacatctgcctcatttctttaagtcgattgaagcataagagcagtaaaaaaacccggattcgcttccgggttttttgcttattttgtttcgcttagtgaggcgacttccgtcgtccagccgaacacgtcggcttccgcgcctttttgaatgcctgtaatggtatcatacaatttcttcgagatctctccggtttcaccgctgccgatgacaagactttcatcattccagatcagttcgccgaccggagaaatgaccgccgccgtaccggttccgaatgtttcttccaatcggccgtcacgatgcgcctggatgatttcatcgatcgaaatcttccgctcagacacagtcagtccccaatgtttgagaagggtgatgacggaatttctcgtaattccttcaagaatgcttccgttcagctccggcgtcacgatttcgccgctgattttgaagaagatgttcatgctgccgacttcttcgatgtattttttctcaatgccgtcaagccataaaacctgggaaaatcccttctcttccgcaacctgctgcgccttcaggcttgatgcatagttgccggcggttttcgcgtttccggtgccgcctttgacggcgcgcacgaattcgttttccacggcgatttttaccggtttaatgccttctttgtaataagagccgaccggggaaagaatgataaacagcttgtacgtatgggatgccgctacaccgaggaaaggctcagtcgcaatgataaacggacggatataaagggaagtgccttccgctttcggaatccagtctttgtcgatggctacgagctgtttcaggccttcaagaacaagctcttcatcaatgagcgggatgcaaaggcggtcatttgactggttcaggcgctccatatttttctccggtctgaacagaagcacttcctgatccttcgttacatacgctttaagcccttcaaaaacggtttggccgtaatgataaaccatggccgcaggatccattgagatggactgataagggataattctcggatcataccagccttgatcggcgtcgtaatccataacaaacatatggtcggtgaaaattctgccgaacgcaaggtcatgggggtccggtttcggttttttggctgaagtcaattcaacacgaatgtcttgtttcatattgttctgtctccctattggtgttattgtcaaacttatttgaaaataatttatattctattgtataccttcaacaaatattcgcaatagttttcctcaaatttgtgaaaaaatcaaatcacataaaaagcaggggagagaatgccccctgcgtgttcgtttttacgtattctgtcatcaccgtgctcagtgaaccgtcaccttgccggttttgtaaaactgctccattgctttatcgacgtacacccagcccttccaggcgatatggatggtgtctttcataaagtacggatcatattcgtgcccggataagtcggcaacctgaaagcccttcgctttaatttgcttagtgacttttttgtagtaatcagtccggccttttttcgggaagccggtgtagtcataccattttccgttgaccggaataaccacgaacatcggttcagcgccggcatctttcagaatgtccagcatatcctcaaagtcgtgatattcgactgatttggcgtatgttcttcctttgttgattcctttcactctctttactttcttcttaatctttttataagaagcgtcatcgatatagaaaggattggacttggagctccgttctcctaattgagcggcggctgtttttaactctgaccacgatttccctttcaggttttcagagatcgtccgttcagggcccttggtttctcccattgaataataaagatcttttttctcaagcagagaataataagctttggcagccggcatgaccgctttcactttccatgattgtccgttgaccattcccttgtacaattcagaaaggacggcatcatgctgaacgactttaaaacggagcatgcgcttcatcatgttctttttgaccgcgggatcaatctggttattaaatgctaaatccaatgcctgaagtgatgaaaaattcggcgcaaagtgctgttcatcagaaccttttttgataaaccattgcggagaaacaatgaataccagttttttgcccttcagctgctgataatgcgccgcaaagttcacggcgtgtatcaaggattggtccccgccttttccgactagataaggcgtaaagccttggttgttcacttggaaatagttggacgggtgaaactcatccagtcttgaaagctcggaagaaccgaaaatcggcagatacttcgagtcttcgaacattttgttttgaagatagagcccctggaacatattcggatttaaggctgccgccgactcttcgacacgtttttcaggaatgaagcgcgtaagccatgaagccggaactgcgatagctccgacaaacaggacgaacgctaaaataattggtccaaagaaacgctttttcatttacttcaactcagtcagtttgtttacaatgttgtttggcgtattccactcgtcacggtcaaattcagtgatcggcactgtaatgccgaagcggttttcgatggcgacaagcagctctacagttccgaaagaatcaagcagtccttcttcaaagatttcaatatcaggattttcttttacagcgtcctcctgacaaacttcagctaatacgtctaatacttcctgtttaaattccatgtgttttcaatctcctttagtgatgaaatggttttcctgagaaaatataaaatccgaaacatacgaaatggaatgtgatgacgatggctaaaaaggccgtaaaacgattggcgggcagccacttgtatttcttattccatttctcaaaaaagttatacccggtcattaatacggcgtggtacaggccgtatacaatatattgcagagcgagtccgtgccagacgcccatcagcatgaacagcaggaaatacccgatgttcgagacggccatccggttctttatccattttttctttgtcatccagaaaacaaagcgcataaatacgtagtctctgaaccagaaggataaggacatgtgccagcggttccagaagtctttaatgtttttgctgataaacggcttattaaagttttccggagatttgatacccatgatatagcttacaccgacggcaaacatcgtgtaacccgcaaaatcaaaaaacaggtacaagctgtatccgtacatgtacagcacattaccccacagtttgctgtgggtgatatgagacagattcataatgaaatacgtgttaatcgcatatccgataatgaatttgtataagaaaccgataaaaattttatgaatgccggtatacagtaaatcagcgtattctccctttgtccatactttctgttcgtccttggcaaatctgcggtatctgtcgatcggaccggaagaaatggtcgggaaaaacataataaagtacaaaaggcggtgaagcggcattttttctttaatcagtccgtctctcgtttccatgatcagctggacgcctttaaatgtcaaataagaaattcctaagaaactgatcaggttatgaaccgggtgatgaggcgccggcggaaagaaaaacggccataatttagataaaaacaggggtaaaatggacgcgatcacggccatactgaagacaaagccgctgttggctttcagtctgtaagcgagataacccctgattaaaagcacctgccacagcgtaaagatacatagtgcgatcacgccgtgcagatcatgcgcgaaaatcaaagccaatacgatgatggatataaacatgttgtatccttggaatctcttgccgttcagccctaaaataatcgtcggcaaaagaaggattccaagtaagataaagaagaaaaacgagctgtaaggcgtcatacaagaacctcttcgccaatgcgtttacggtcgatttttccgttcgcagtcatttgaatgtgatcctgataaatgaattttctcggaatcatgtaggccggaagcgaagcggccagttctttcttaatggcgcttgtcagctggaattctttttcaaaatcatgtttttcaggcacgatggcggcaattagatattcgacaggtccgttaggctgatacgggatgacaaccgccgtgcgcacatattgagactgccttacatgtacttcgatttcctccagctccatgcggtagccgtgaagcttaatctggaaatcaaggcgtccttggcagaaaatctgaccatcctgaacataaccggcatcacccgtgtgatatgcccactggccgtcgatcgggaaaaacgctttttccgtcagagaaggttctccgagatagcctttgcttacgctcgggcccgcgatgatgatttcccctttttctccgtccggaagcttattcccgttttcatccatgatgaagatatccatatcgggttttgcaaaaccgacgggcagggattcattttcatcgatgatctgctgcgtaatttcaacggaggtgacggcaaccgttgtttcagtcgggccgtatgtattgaatacgcgggccttcggaaaacggtttaacagctcctgtgccacggcagccggaagcgcttctccgcaaaacataaatacttctgcctcaggcaggagctcctgcgtaaagccggggtccatcagacacatttggacgaaagacggcgtcgatgtccagacgttcagtttggatttctccagctcttcaaatagtactttcggtttattgattttgtctttcgttacgcaatgcagcgtacctcccgtttgaagcgacgggaaaatgtccatgacagataaatcaaaagaaaacggagcttggtttaagaatgtcttacccccgcccacaggaaaatccctgcagatccagtcagtaaagctttgcaggttatcagccgatatctgcacgcccttcggatttcccgtgctgccggacgtgtaaataatgtaaaacgtgtccagctcttttacccaattctcacggctgaggtctgcatctccgtcagctgcaagctcttcgggcgtaacggttttaatcagattgcttcccgtatcgactgcatcgcccgatacgctgataagcagctctgcgcctgagctttcaatgattttgacgatccgctccgccggaatggaaacatcgacagggatgtaagggcggcccgctttgacgcttcctaagaaagaaacgatcatattcggctccatatgtccgtaaaccaggacaggcgctttcgaaccgtcagctgtatgtttttgaatgccggacgcaacccgctccgacaaatcccataattccccgtaagtgagggaatgatctaaggaacgaaacgcttcggcctgcggcttggcgtctgcatatgtttttatagcatcaagtagtttcatagttatcctccccgattagaaatcgttgtaaatataagtgccggtattcgctgtatgaaatccatacatccaaaagagcaatactaatatcagaaaataaaagcccgtatgaaacgtccatttgatcaatgtattttcataagcacgttttaatttttgcaacatattcaaaattccttccccgcgtattcaataattacaccagtatatgacgattagattaacaaaaagtttcaaaatatgtctaatatcctaagcttaaaatttccttaaaaatgaatgagaaacaaaaggatggaaaacacgcatgtataaattggcaaatgatcatactaaaaaggcgctgttcaggcgggatttttaacttatcgtaaatataaacgaggtaaaaaaattttggcggctttttcttaagcaggcttgtgccgaaccccaatggagaagggcgaaaagccgtttccggcaggatagccgataaagcgccgcatcttgtgaaatgaggaagaaattattatgatagataaggtagcagaaaacgtgaaaaccccaattcaacactactgttatcggctgactgtgaaagccttttaatagaaaggaagaggaaaatgaatcaaaacaatatggggggcagccaaaagacgcccgagaaagaaagcatgggccgcattttgtggcagctaacccgccctcatacattgacggcatcgtttgtgcccgtacttctcggcaccgtattggcgatgttttacgtaaaggttgatttcctgctgtttttggccatgctgttttcctgcctttggatccagatcgccacgaacttattcaatgaatattacgattttaaacgcggtttagatacggaggattccgtcggtatcggcggagcgatcgtccgccacggcatgaagccgaaaacaattctgcagctggcgctcggctcttatgcgattgccctcgtgctcggtgtttatatctgcatgagcagcagctggtggcttgcggctatcggccttgccggcatgctgatcggctatctgtatacgggcggcccgctgccgattgcgtatacaccgttcggggaactgttctccggcatttgcatgggctctgtatttgtccttatttctttcttcattcagacaggcagaattaatgaacaaagcattttgatttccatcccgatcgccatcttggtcggagccattaatctgtccaacaatatccgtgatattgaggaagataaaaagggcggacgtaaaaccctggccattttgatggggcatagaggggccgttatgatactggccgcatcttttgccatcgcttacatctggatcatcggtcttgtcatcatgggttacacaagcccgtggctgttcctggtcttcctgagcgtgccgaaacccgttcaggccgtgaaaggctttgtgaaaaacgaaatgccgatgaacatgattattgcgatgaaatcaacggcgcaaaccaatacattcttcggattcctgctttccatcggactcctgatcagttatttccgctgatcaaatgaaagggcaaatgccataaccggcatttgcttttttttatgacataatcttcacgatattgtaaagaacctgaccgcggactgacacgtctcatatatggacagcaaagcaaggagatgaaaaaaatggacttgtcaacagcccatatggatgatttgaaaacggtcatggaagattggaaaaatgaattattagtttataaattcgctttagatgagctggatacgaagttttctatcatcagccaggaatataatctgattcacgggcataacccgatcgagcatacaaaatcacgcgtgaaaagttttgagagtatcgtcaataaactgatgcgcaaaggctgcgatgtgacgacgcaggaaatgaaagagcatattcatgatattgcgggtgtcaggattatctgttcctttatttccgatatttataatgtcgctgaggttttgaagcagcataaggacctgaagatcgtaaaggtgaaggattatatcaaacatccgaagccgaacggctaccgcagcctgcatttgattattgaaattcccgtttatttgacgaatcgtgtggaatatgtgaaggcggaaattcaaatccgcaccatcgccatggatttttgggcgagtcttgaacataaaatttattacaaattaaataacgaagtcccaaagcatctgaccgacgagctgaaggaagcggcggacatcgcccattatttagacgaaaagatgcttgggattaagaaagaagtcgattaaacgattgacccatcacaaccagccggaccgcttttatgtgcagtccggctggttgtttttatgtttacgtgttttcgctttcccgcgcgatttattctgacgatgattcaggctgaaattctgattgaatttgaacagagaatgcaaaagatatcaaatcgcaaacagcacattcccgcagaaaaaatgtgtaagatcgaggtttactttttttaaaaagggaaagacatttgtacaacaaaaagggagatgaatatcagtgggaaagaatgaaacaatgcatatcgtatcatgtgccgatgatcattatgctcgtcatttgggtgggatgttcgcttctttattgatgaatatggataaaacaagggatgcgaaattatatgtaatcgacggcggaattactgccgaaaacaaggacaagcttgaacagaccgcgatgtcattcgggacgccgcttgaatttttagaagtagacgctgatcaatacaagcatgcagtcgaaagcagccacattacaaaagcggcttattaccgcatttccatccctgatttaattaaggatgagtccgtaaagcggatgatttacattgattgcgatgcaattgtgatggaagatatttcggttttatgggacttggatatttccccggcaatagttgcggcggtagaagacgccggacagcatgaaaggctgaaaaaaatgaatatcagcgacactgccaagtattttaattccggtattatgattatagatttcgaaccttggagaaaacaaaatatttccgaaaaggtgattgattttattaacgaaaacagctcggaggattttctcgtgtttcatgatcaggacgcgcttaacgcgatcttatatgatcaatggcatgaactgcatccgcgctggaatgcgcagacgcatattatcatgaacgagaaaacgcctcctgaactgatcgaccgtatacgttatagagaaacacgtgccgaaccggccatcgtccatttctgcggcagcgacaagccttggaatacaggcacctcgcacccgtatcgtgatcattatttccgatatatgtcctttacgaaatggaacacgatcgaccgcccggccatgaaccaataggcaggtgtgatgaaacgcttgtgaagccgttatccggctcataagcgttttttgctatttcacccgaatcgcacgcacgcgtttttgcaggctggtcttttcggcagacggcttcaatcggctgactgccgtttgcgccgctgattttgcttttttcgtctttgttttttcagccgtttttactttgtctctagcctgctgccggttgagtttatcttttatccggtcaagccgtttttccagagcggttttttcttttcccggctggatttcgctgactgctttttgggcttttgcggtgctggcctcagaggtctttttttccgcctgcttgacgctggcctcagctgttttcaaaaggcttgagttgacagcgttcagccgcttttgcagcccttttttctctgaaccggccggtaatttgcgaatggcgctttgtgcggcattgacggcggtttttttcttttgtttttcggcagtccggactttgtctcttgcgtccgtcacatttcttgccgtctgaactttattgatccgggactcgagagcggtttttccctttgacttggacagcttgctgacggccgtttttgcttgattgatatctgcctgttttttcgtcttttccgcttttattacggtccgttcggcatagctcttttgctttacatgatattgcaccaggccgtacccgaatcggctgtcacgtccgggagcgcccagatctttgacgttttgctgcatctgctgccggagctgtgtatttgtttcctcgggatatttctgcctgagcagcgcgaacatgccggtgacgtggggcgcggcttgagatgtgccgtcagccgtggcgtacatttgattcagatacgtgctcgtaatattggtgccgggtgcggcaaactcaatttgttttccggtcgtggaaaaagccgcgagcccgtttttttcagttgacgctgagactgccgttacgctgctgtaggcgcccggataattgacgggttttttgttgccgtcgtttcctgcggcggctacgatcacgattccttttttgtatgctttgtctacggcgtcgtgaagaattttgctgtctgcgttagttccgaggctcatattgatgatgtccattttattggcgatcgaccagtcgatcgctttaagaaggcttttaagatcccctgcaccctttctgtctaatgccttaactgcatataaccggacatccggcgcgatgccgtcaatgccgtatccgtcatgtttggccgcaatgattccggcgacatgcgtcccgtgtccgttgtcatctttgtatgaggaagtatagctgactgcggaatagcctccggcaatggaaaggtcatcatgagggtaaatgccgctgtcaatgacagccactttcaccttttttcccgtcaagccttctttccacgcctgcttgacctgagtcggttctatatcccattgcggcagcgcgtaactgctgctttgggccgctgataacgggcggatatcagaaccgcctgctgcctgaaaggatacattgtcttctacatataagatgtcagggtcctgtttcaggtctttcaccgtttgtgaatcggctgacacggcgactgccgggagatgctgataggtctgttccacatccgctccgctgtctatggcggattccttgccgttttgatttttgtacaccacgataacgtcccggtcgtgcgtctcggcgtgcgcgggcgccgcggcggagaacaggccggcgcacaaggccgcggccattatcggtttcagggtgtgatacattgcaattccccctttttctttatatatcggcagtgcggaattctttttttcctgagggataaggaaaatttctgtatgcaaatgtaagcgtttccaaaatatgatggagaaaatgctttaagacatctgcgcaatgaactcaaaaagggggtttttgataaatgagtacgttcaatcgggtcatggaagaaaaaatcatgcctgtcgccggaaaagtcgccggccaaaggcacttaagagctttgcgggacggcattattttgactatgccgcttatcatcatcggatcggtttttctgattctgacgagtcttccgattcccggttatgccgattttatggctggtcttttcggtgaaaattgggttgaaaagctcgggtatcccgtgaatgcgtcctttgacattatggcgcttgtcgccgcctttgggattgcctaccggcttgcggaaagctatgaggtggatgccctgtcgtcgggagccattgcccttgccgcctttttattggcgacgccgtatcagattccgtttattcctgacggctcggcaacagagattatggtgggaggcggcattccgatttcgctgctcggaagcaaaggtctgtttgtcgcgatgatcattgcaatgctgtctacggaagtgtaccggtttatcatacaaagaaatatcgtcattaaaatgcctgacggagtgccgcctgcggtcagcaaatcgttcgttgcgctcatccccggtttcattattattacgcttgtatggctggcccgtctgtttattgaaataactccttttaaaagcctccacaatgtcgtaggcgatctgctgggcaccccgctgtctattttgggcgggagtctcggcggaagtcttatcgccgaattcgtgcaaatgctgctttggtcgtgcggcatacacggcgcgtccattatcggcggcgtcatgtcgccgatctggtacggggcgatggatgccaaccgtttggcttttcaggcgggagaagcgctgccgagcatttttacgacacagttctttcaaatatggattaatgtcggcggaagcggagcgacgcttgcccttgtgctgaccatgcttgtgcgctccagaagcaaacagatgaaacagctcggccgtctcggaatcgggcccgcgatttttaacattaacgaaccgattattttcgggatgccgctcgtcatgaatccgctgttaatcgtgccttttatcattgcgccgctcttgaccattacggcgacgtacatcgggatgagcacggggatggtggcaaaaccggcgggaatcgccgtgccgtggacgatgccgccgctgatttccggttatttggcgacgggcgggaaaatctccggttcggtcatgcagctgatcaatctcctgattacatttatcatctattatccgtttttccgaatttgggatcttcaaaaatggagagaggaacgggcggcggaacaaaacgtcactgaagaaacataaaaaaaacgggctctttcgcccgttttttttaacgctggaaaaattcgatccattcgccgtcaggtccttcaatgtaaaagtagcggtacccgttcggaagcgtcgtgatttcttcatcgataaatacggcgccctgacgcttcgcatgcgtgaactccgccgcgatatcttcagttaataaagcgacatgatggacttttccttctgcgggaagctcgctgctgtagccctggatcagttcaatttctgtctccggcccttcttgaaagccgagaaaggcaagttcaataatgccgttcgtatgagtgatacgatcctttaactgcataccgagaacatcttgataaaaggcgatggatgtttcaatatctttgaccataatgcctgtatggtcgattcttttggctgtcatggttttccccctgttttgaatttttcgggacaatgcggtgttgatcatgttttatggtacgataagagaaagcaaaacgaaagaggaatgcacaatgaagctacttacagtgaaagatacatttgccggaaagctgaaaaaaggattccccctgattgaaaaagacgctctgtccggaagctcggctcatctaacagagggcgatctttttgatgtgacatccgagaagggtgagtttatcggaaaaggctattacggtttgcagaataaaggagtcggctgggtgctgtcccgcgcgagagatgaacggatcgacggacgtttctttctggacaagctgaaaaaagcggctgaagcgagagctcatctgtttaaggcgcccgacacgacggcgttccggcttttcaacggtgagggcgacggcatcggcggcgtcacgattgacttttatgacggttatctgctgattcaatggtacagtaaaggcatttacgcttataaggacagcatgattgaggcgattgacggactggagctttcttataaagcgatctatgaaaagaaacgattcgatactgccggacaatacgtggaagacgacgattttgtcaaaggcgaaagaggagattttccggtcattgttcaagaaaacggcatccgatacgcggtggatttaaacgacggggcgatgacgggcattttcttagaccagcgtcatgtgcgcaaagcgattcgggacaagtatgcaaacggcagacgggtgctgaatacgttctcttatacgggggcattttccgttgcggcggcgcttggcggagctgataaaacgaccagcgtcgatgtcgccaaccgcagtctcgcaaaaacgattgaacagttcagcgccaacggaattgattatgaggcgcatgacattaaagtcatggatgttttcaaatacttcggctatgcggcaaaaaaagggctggagtttgacctcatcatccttgatccgccttctttcgcccgcacaaaaaaacggacgttcagcgcggcgaaagattataaaaatctgctgaaggaaacgatcgccatcaccgcaaaaaacggcatcatcgtcgcttcgacaaacagcagcgccttcaatatgaagaaatttaaaggctttatagagaccgcctttaaagaaacaaatgagcgttacgacattttggaagaatacacgcttccggaagatttcaaaacgattcccgcgtttaaagaagggaactatttgaaggttgttttcttgcggaaaaaatagaatgaccatttatagcgtggaaagaggggaaaagaaaaccctctttcatcgcgttaatacgggataaaataatcttcatatcttaaagaaacaacccgctattacttagtatctcatctgtgctaagtaaagtggcctcactaatccccacattgttggctttcatgaaggattgcaccgcttggtagccaaccgcataacctgcaaacggtgataagccgacaggctgataaccttgttcggctgcaaaggtgtcgccaaacatgtaactgctgacctcagcaaatcctttcatatttaatgagtctttgatgatttcttttgagtattctaagtcttctttttcaaaagaagtaacccagggacctaacagagcttctccgtaaagttctttagcaaacgattctgccaacccctctataattaagtaatcaccaaccgttacgttcccataatcccaattgaaatacgaaaaatgaatattatgatgaaattcatgtgcgattacagcaggcagtctcggtatgttatatgaattggggaatattgaaacttgaataaatcccggaattcctccgaatccacaataccctctatgtaactcaagctttttttgattggccagatacatcccaaaccttatttcatcagcatttatttttaagcggttttgtttgataaattctacacaatgagttaaagtgccatatgcaatttgaagagcttgaatttcttttagattctctaatgcttttcttccggtgtccgtatcaaatatgctcagatagcccagcatatttgtagccatgattacatcatatccgttaggttgctttgcctttaagggaacattaatctttttccacatatcttcaaaaggtttcatcattgaataccgataataatcttctctattttcaatcattgaaaataacgtttcgtattgcccaattgtatcctcgataatgattttaatgggtaccaccctttttttgatgatctatataaattgtaatggcatcactcatgagcttcgccaacccttcaccatactgatcgatgttcttagtgaagcgtttatcttcaatatagagttgacctaatccgtaaaaggcatcaaaagaatattcaccaaaattttcattgagaaaatcaaaccactctttgatagctgtttgtacttctggggacttgggagattggttaataaggagtgcaaatttattgaacattgcagtccacttatcagataaatctttttgctcaccatcagtcatgtttttcaatctaatatttaccgtatcgacaggttgatcaccccaccgtttgcgagcttcttgttcataaagattatgattgaagttcattccctcaaaccgctctttgttcgtcatgcaaatttctcccatcatatgtttgattgatttatcgatggtttcaatcattttatcaactctattccgtttctcaatcaacattttcttttgtaaaattaatgcctcccttcggttaaatgaaggactattaatgatttctttaatctcttttaaggagaaatcgagctccttgaaaaatagtatctgctgcagctgttcaagattctcttcagaataaagccgataaccggaatctgtcgtttcctgaggagtcaataatctaatttgatcgtaatgatggagagtacgtatgcttactccaatcagttcagctacttcttttactttcatacccatcacgtttgccgcctccttaatggctactctaaagtattacgcaacgtaagagtcaatagttagttaaagattttttgtatataaagggagaacatatgaggatttcattgctgaaattaaagaaaaaaagccgggcgtgaagctccggcttttttctattcaataatgtgctgcacccggccgattcgtccgtcttcaaggcggaccttaatgccgcgcgggtggaagcttgagttcgtcaaaatatccttcacgattcctcttgtcagctttcctgaacgctgatcggctttcaggacgatatcgacttcaagtccttttctgatgctgcttcgctgctggccgttcatatgacacatccgttcttcagtcttttcacttcatatcttatcatatcgtgttttccccattttatgaaggacagacgaatcaatccttcatagcaaataaaaaaagaccgctctgtaaggagcagtcttttatgacataaacgaaagcaaaatcggggccgcgcacagcgtcataattgcggcgagaatcatggacacgcttgagatcgttcctgatacggagctgagctcaaatgctttagatgttcccgctccgtgcgcgctagttccgagcagcacgccccgggcaatttcgttatcaatgcggaaatagcggatgaccatcggcccgatgatcgttcccaataaagccgttaaaatgacgaaaaccgctgtaacggccggcatcccgccgatcatttctgagacgttcatggcaatcggcgtcgtcacggatcgcggcacgagactgtcgactaagctgctgccgagatggaaccatttcgcgataaaggccgttgacagaatggcgatacatgaaccgaccgctacgttcaaaataatttccacggcgtatttctttaaaatcgggaaatatttataaagcgggatagcgaacgccactgttgccggctgaagcatatcggtcagcagtccgccgccgagattgtatgtctgatacgggacattgacaagaagcagcagtacgaccaaaacagcgggcgtaatcagaagcggcgacgtatacacccgcggaaaacgaatgtagagttttttcgcgcccaaatatactaagacagttaagaataaacttatgattccgatgaacacgtttgttttttctcctttctttttgctatcagctgtgtaagcgtacctgttgaaaccatcacgacaaatgtgctgatgacgacgacaagtaaaatgcttacgccgaatttagacataatatctccgtattcaatcactccgacggcagacgggatgaaaaacagcagcagctcaccgaggagccatgctgcgccaagctcaatccattcaagtttgataatcttgaaatgcaataatgtgaaaagaatcacaatcccgattatactgccgggaatatttatatgaagagccgccgtgacccaattgatcagacgcgcaaatataaacagcagagcgatttgaataacggtaagcagcaattttttcataatgatgcctcccttatatttatattgtacagaaggttttgctataggtaaaatacatataaagaataatgtgtattccttttgtctatagaaaggatgaaatgtaatggatatccggcacttaacgtattttttggaagtggcccgtttgaaaagctttacgaaggcttcacagtctctgtatgtttcacagccgacaatctcaaaaatgattaaaaacatggagacggagctcggcattaagctgttttaccgcaatggccggcaagttgaactgactgacgccgggcagagcatgtatgtgcaggcgcaggaaatcacaaagtccttccaaaacctgacgtcagagctgaacgatattatggaagtgaagaaagggcacgtccgcatcggtcttccgccgatgatcgggtccggctttttcccgagagtgctcggtgacttccgcgtcacatatcccgatgtgacgtttcagcttgttgaggacggctctattaaagtgcagcaaggggtggaggacggctcgcttgatatcggggtcgtcgtacttcccgcgaatgaagagatttttcatacgttcacaatcgtcaaggaaacccttatgctcgtcgtccatccgtcacatcggctcgctgacgagaaagaatgcagtctccacgaattgaaagaagagccgttcatatttttcagggaggattttgtccttcataatcgaattatgacggaatgcgtgaaagccggattcaggcctcacgtcatttatgaaacgtcacagtgggactttatcagcgaaatggtatcggccaacctcggtatcggcctgctgccggaaagaatctgccgcggtcttgatcctgacaaagtcagaaccattccgctcgttcatccggtcattccgtggcatttagccatcatttggcggaaagaccgctatatgtcctttgccgccagagcctggctggagcatacgaaatcgtatttatggaatccgaaaaagagaaaaaaggatgattaagcatggacgcacaaaccgcagctcaacacttgagtaaagtgcgggatcaaaacccgctcgttcacagtatcaccaataatgtcgtcacgaacttcaccgctaacggactgctcgcgctcggcgcatcgcccgttatggcttatgcaattgaggaggccgccgacatggcgaaaatcgcaggagcgctcgtcctgaatataggcaccctcagttcggcgtcggttgaagctatgatcgcagccggaaaatcggccaatgaaaacggcgttccggtcatttttgatccggtaggcgccggcgccacgccgtttcggacggcatcagcccgcaagatcatacaggaggtccgcttgtccgtcattcgcggaaatgccgcggaaatcgccaatattgccggcgcccctgattggaagataaaaggtgtggatgcgggggaagccggaggagatgtggttcagctcgctaagacggctgcaagcgggctgaagacggtcattgcgattaccggaaaaaccgacgtcatctccgacggcaccgacacatacgccgtacataacggtgataaactgctgacgaaggtgacgggggcgggatgcttgctgacgtctgtaatcggagccttctgcgcagcggggcaggacgttctgcaagcggccgtttcagccgtttctgtatacggaagcgccgctcagcttgccgctctggacacctcccataaggggccgggcagcttccagattgagcttttaaacaagctggcaagcatctcagaacaagaagcggccgagcttgccgcaattgaaagggtgacagaaaaatgacgcgtatttctcgggaaatgatgaaggatatgttatcggtttattttattatgggatcaaacaatacaagctcagaccccgtttccgtggtgaaaaaagccattgagggcggcgctacgctttttcaatttcgggaaaaggggagcggttctttaacaggggaggaacgtgtcctgttcgcgaagcaggtacaggatgtctgcaggcaggccgggattcctttcatcattaatgatgatgtcgaattggccttgcgccttgaggcggacggagtgcatatcgggcaggatgacgcagacgccgaagaaacgagagcggcaatcggcgatatgatactcggtgtgtcagcacataacgtctccgaggtgaagcgggcggaagaagccggagccgattacgtcggaatgggcccggtctatccgaccgaaacaaaaaaagatgctgaagccgtgcagggcgttacattgattgaagaggtgcggcgtcagggcatcaccattccgattgtaggaatcggcggcattacggctgacaacgcggcgcccgtcattgaagcgggtgcagacggcgtcagcatgatcagcgccatcagccaagccgaagatccaaaagcggcggcgcggaagttttcagaggaaattcagcgctccaaagcagggctgtcccgataggacggccctttttctgtgtgcgcaaaaaggcagtgacggacttggagaatataagccgtatgtcaagaacagggcaatcagcttgcaatatcgaccgaagtgtttgacggctctatcgcttcgctcaaagtgatgcctgaaccaatcattgccggcgccgaaggcttaaaagccctctatgaaacagtgaaaagcgcgcagtgagagatcatttcgaggtcacggaaaaacttgatgcggaattcagcgaatttgaaggtttgatgtcgaaatacaaaacgtgcgatcaatcgtatatgtcttgtgatacattaagtacagatcaaatcagagagataagcacgaagctgacggccctttctgaaaccatgtcgaagattgccgatgtgctttaaaaggagttaagacgcagcatgagcgatgaacaaaacaaggaaaaacagatccacagacgggatgtcctgaagtggggcgccgtcgcgggcgccgccgttgctgtcggagcgagcggcctcggaggactcgcgccgctcttcaaaccggcggccaccgcttcaaagaagaatgatgaaaaacgtgatcgtgatcaaatcgttcctttttacggaaagcaccaagcgggaatcacaacggcgcatcagacgtatgtgtattttgcggcgcttgatgtcatgtcaagcgacaaagccgatgtcatctcccttttcaaacaatggacaagcctgacgcagctgctgacttcaggcgccgtcccgtcgggcgaacagaaaaataaatatatgcctccgcaggataccggggagtcgcaggatctggcaccggcgaatttgaccgttaccttcggcttcggccccgggtttttcgagaaagacgggaaggaccgcttcggactgaaagataaaaaaccgaagcacctcgccgatattccgccgatgcctaacgacaagcttgataagaaacaaggcggcggtgatatcgtcatacaggtctgcgcggataatgaacaaacggcgtttcacgcggtgcgcaacctgatgaaacaggcatcgggggtgtgcgaagtccgctttctcaataaaggtttcttaagcggcgggaaaaacggagaaacaccgcgcaacctcttcggatttaaagacggcaccggcaaccaaagcacaaaggatgaaaacctgatgaattcgatcgtttgggttcaatcaggagagcctgactggatgacgggcggcacgtacatggcgtttaggaaaattaagatgtttttagatatatgggaccgttcatccttgaaggaacaagaggacacgttcgggcgggtgaaaagctcgggcgcgcctttcggacaaaaaaaggaaaccgatcccgtgaagctgaatcaaattcccgccgactcgcatgtcagcgtggcaaaatcaaccggcagacagattctgcgccgggcattttcctatacggacggaattgatccacagacgggctatgttgacgcaggcctgctgtttatctgctttcaaaaagacccggaccgccaatttgtcccgatgctgaaggctttggcggcaaaggatgcgctgaatgaatacacacaaacgatcggctcttccttattcgcctgtcccggcggctgtaaaaaaggagaatatatcgcccaaaggctgctggaatcgtgacaccttccatatggagggtgtttttaaaaaaaacacttgtaactacatatgttacaacttaaaataaaaaggaaaggagacttacaatgacactgcagattaaagtatattctgattatgtatgtccgttttgctttgtcggcaaagcggcgtttgaagaagcaatcaaggacaaggacgtacaggtggaatggatgccgtttgaattgcgtccgagcccctcgccgaaacttgatccggtgaatgatcccgccaagcggcagatgtggaaaaactccattgagccgatggcgcagtcgttaggcgttgaaatcacgttcccccgcgtgtcaccgcatccttacacggatttggcatttgaaggctttcatttcgcaaaggaacatgggaaaggaagcgaataccatacacgcgtttttcaggcgttctttcaggaagagcaaaatatcggtgacgttggcgtgctgacaaagcttgcggaagaagccggacttgacggcgctaccttcaaagaggcgcttgagacaagagcgtacagacacgtacagcgggaagcgctccgccatgcttatgaggaagccggcattacggcagtgccgacgtttatcatcggcgatgagagaatccctggcgcggcgggaaaggaaacctttgaacaaatcattgagcgggaactgaataaacgttaacccgaaaaaagccctctcgatcagcgagagggctttgccatatagtgtttgacaaatgtttgtctgtccgcttcatatgccgcggcgtcaaatgagtcgccgcaaaaatgaaggcaccaagggtctttctggcaggcgacgccgacttgatagccgtgtttttgaaattcaagcgactgtgatgtgtcgtaaaaatgaaagccgcgaaacaaatcctcccgccactccacgtcatattgagccgccattaacaagccgtcaatggcgtcagcgggcgtaaacaggccgtcttcatcgccgtgctcaaagtccagcgggtgataagcattcccccggtattcaatcacttttcccatccgctctccgctttcccaccaaatgccgttcggcggcagggttttgcagccggcgacaccgagaaggccgagctcctgatgagtttgaaagatatgaagcatgtcatgtaggaaatgctgatgaatgataaaggtatcctgatgcagataaattttatatttggaggggtgtctcagcgctttgttgtaggacgaggccatgcttgctgaatcgtatatcggcatgatatcaacggagtatgaaggggggacggtaagctgcatgatatggcttttgcatcgggagtagagcgactcgtcattcacacagacgacaaacagaaatgaatgtgaatccattacatgctcctctcggcctcaatcacatattgataggccgatgcttctgtcataaagtcatgccttatgccaagctgtacgcatacttcgtgcaatgctgcgatggctttgtggtaagaggggtgatcaacgcggatcgcctcaatgcgtttcacctcatagccggcagctttaaataatgaaagtgtctcttcacgggtaaaaaaacgcaggtgggtctgatccattaatccggcgtcactgtaagtccatttgccggctaaaagctccagcaccactgagatgtggccgacattcggtatgcatgcaagcaccgtgccgtctttttttacataaggacgaagctttttcagcacggaccacgggtcgacaagatgctcaagaacgtctccgaacagcatgcagtcgaattgttctgattcgtacggaagaatggcggattcaatgtcgccgcaaagcacgtggctcaatttgctttccgccttttttgcggcttcgggatacgcttcaatgccgtaaaccgttattccgcggtcttcgatcgccgctcctaaattgcctgtgccgcagccgacatcaagcactgtccgccagttttcgtctattttgttcaataaataaggattcaggccttcgtagtagttctgttgtttttcatcataatagggattcgtatccatctgtgtatcacctcataaatgggcatatacacaagatatgcagcggggggatctcatatcaccatgtttggctgttcaattgcggaatgcggacgggaatggttgtccggtatacggtttgttctctgattcccctcttattgcggctgttcctttgaaaactcgggtgcgggcggactgtggcaggtcatatagtaaaaggatccgcctgtaatcttaccgctggcggatggtgtttttcattggtgtttttttcttcaccgctttttcagtatttaagaagcgcctcacatcgtcaatgtgcaaacccatgattctagcctcttgaattaacaattgccaatcttgatctatatctttcattacatgagttttcataagaacctccaattgaaaaattgatttgcccagctacagcagccaatgtataacaaatatcacacatagttggccggtaatcccaaattgaagatgaattcacctacctattccctaagaaaatgactgaaataaccaaaatccttcaagaattcttacgtataataataaacaaataaatactgactggatagtatgcaaataaaaataaatcatatgacctattaatatttaccctcaaagcgtcgactagcatattctttttgcataaaaaataccgcaaaagaatgattcggtgtaagataaagtgaatgatcaaacagctggggtaaaaaatgaaaaaaaacaaatttcaaattaagagagaagaaacatttgaaagttttattgacgcaggccttcatctcctgattgaaagagcttacgattcagtctcaatcgatgacatcagtaaagcggcgggtttcagcaaaggcgcgttttacgttcattttgaaagcaaggaagattttctgaagcatttattagacaggcgtcagattaaaaaaaggatcatcaccggctatctcgatgaattagaaaagcaaacagcgcggccgttgacgctttgtgaagctgcggcaagcgcggccagtctgttgatgcggtttgtaaacagcaagcctgcctggaatgttgtgtcttttgccgttcatatgcctacttacaaagtcgtcagtgaatatgaagcttatatccgtctttataagttatggatagaagaaagcaccatgtacataaattggctcaaatcgagaaatttaatagaagaccatatagataccgagcataccgctaaaatgatgtgcgcgctcatcgacgggatgattaagcaatccaatgtgctgggaaggccggttactttccgcagcatgtttgacgcgctctatgtttttgtcagcggcagaaaatcagggtaacgttcttcttgatttgacaaaaggtttagaaaagtctttcagaaagcgaggaactgccatgcgctacagagaaattatgatgtatatcattatggggatattcacgaccatcgtgaatatcgtcagtttttactttctgacgtcggcatttgagatggattacaaggcggcgaccgtcgctgcttggattctgtccgttctatttgcatatgtcacgaataaactgtatgtatttcagcaaaagaccgcggggatgcggagtctgatgaaagaattgacggcctttttcagcgtgcgggtattgtctctcgccatcgatctcgccatgatgattcttctggtcagtcaatttcatatgaacgaaacgttggcgaaaatcgccgataacgtcattatcgtagtcgtcaactatgcggccagcaagtggattgtcttcagaaaagcgaaagaagagggcgtgtcataacggtttctttccgcgccccgggggaaagtgtaatggtgaaaggggatgcgtatgaagcacacaataaagaaagcgtttgctgatgtattcggggaatcggaggacctgcgcattttctttgcgcccggcagagtgaatctcatcggagagcatacggattataacgggggccacgtctttccttgcgcgctgacgatcggtacatatgcagccgtccgggagagaggggacaggctcgtcagaatgtactctcatcattttaaagatgcgggcataaaggaatgcagtctcgataatatccgttatcaaaaagaggacgggtgggccaactatccgaaaggggtcatggcggaatgtctcggcagcggtttttcccttccgcacggcctcgatattgtgttctggggaaacatcccgaacggcgccgggctgtcatcttcggcttcgattgaacttgttacggcggtcattctcaaggaatgccatgagcttgaggcggatatgctcgacttggtgaagctcgctcagacggcggaacattcctttatcggcgtcagctgcggaataatggatcaattcgccatcggaatgggaaagaaacatcatgcgattctgctgaattgcggtacgctcagctttgaatatacaaaactcgggctgtcggggctgtcgatcgttattgcaaataccaataaaaaacgaacgcttgcagactcaggctataatacgaggctcaaggagtgcggggaagcgctatgtgatcttcagaagcatctttccgttcaatcactgggagagctgaccccttccgcttttgacgctcatgcggagctgattcagaatgaagtgaacagacgccgggcgaaacacgccgtctatgaaaatcaccgcacaatagaggccgccgacatgttcagtaacaatcagcttcatcatatcggtgaattaatgagggattcgcatctctctttacgcgatgactacgaggtgacgagtcatgagctggatacactggctgaagcggcctggcgccacggcggggtgatcggatcaaggatgacgggagccggtttcggcggctgtacggtcagtatcgtcaaggatgatgcggtttcggattttattgaaacggcaggagcccgctatgaggaaaagacagggagaaaagctgacttttacacggcggatgtcggagccggagcgagagaactaaagggggatgacgatggcaattgagcggcacgtggaacgtttaatccggtacggattgcaaaaagagctgatttcatttcttgatattgaatatacgagaaaccgtttgtatgaagctttgcatatcacccatccggaggtttcagaacagaaagaaaatgtatcggcggcatcattgccggacatattggccccgatttatgaatgggcggcagaaacgggccggattgcagccgatacagacacctatcgcgacctgctgagcgcgaagatcatgggctgctttgccccgcagccgtccgagattgtccgtcgttttgaagaaacaaaggcggtgcacggaccggagcaggcgacaaaggcgttttaccgattttcagaggatgtgtattatatccgttcggacagaataaagcggaatgccgggtggacggctgagacggcttacggaaagctggacatcacgatcaacctttcaaaaccggaaaaagatccgaaagcaattgccgctgccaaagagcagcctcaatccgattatccgagatgtgttctttgtaaagaaaatgtcgggtacgaggggagaccggatcacccggcgcgtcaaaaccttcgtgtcattccggtaattctcggcgatgagcagtggtttctgcaattttctccgtatgtgtattaccgggagcattgcatcgttttgaaagaccggcacgaaccgatgaagatcagcaaaaaaacgtttgaccggctgctgtcgttcgtcagccagtatcctcattattttctcggttccaatgctgatctgccgattgtcggcggcagtattttaagccacgaccattttcaggggggcaattatgaattcccgatggcgcgggcggagacagaaagccggtacaggctgcctgactatccgaaaacggtgttgggaattgtgaagtggccgatgtcggtcatccgcctgcaaagcgagagtgcgtctgagctttccggcgcggcggatgccatcctgcgggcgtggcgcggttattccgatgaggcggctgatctcctcgcccattcaggagaaacaccgcacaatacaattacgccgattgcccggcggagaaacggtttattcgaattagatctcgtcctcagaaataaccgcacctctgatgagcatccgctgggaatttttcatccccatcaggaagttcatcacctgaaaaaagaaaatatcggactgattgaggtaatggggcttgcgattctgccgggccgccttgaacaagaaatgaaatacacggctgaagcgctgtgctcaccggacccggaagcggtcttaacggcagacccttctgcggcagcgcataaagattgggcgctcagtgtgctgcataagcggaaggtaacgaaagaaaacgcggaacagattctgaaagaggaaatcggccatgcctttgcgcggatactggagcatgccggcgtctttaaacaaacagaagaaggcagagcggctttccggcggtttatccgccatttgggcgctctaccggaaaaaagccccatcccataagggacgaggctttttttttatcctctgcttctggcgatcaggctgaataagaacaccacgatcgcagctccgatgattgccggaatgatggcaaagccggcaaggtgagggccccatgtgccgagcagtccgtgcccgatccatgcgccgatcagaccggcgatcattgacccgatgattcccccgggcatactgccttttacaaataaacttccgatccagccgataataatagcgacaatcagagatacgataaaacccataaatatcacttcctattttttattatttatgcctatatgtttccttcgttttgtccatattaaacatatgaatgtgttttttataatgaacatatcaaggcgcgttccggtcttttttttcacaatgcattgcgttaaaatggaaaccgtgtgaaaaggtgtgagcaaaggaaaaaatatttcttttgtagaatgtttaacaaaatgaaactttttgttgaccagcgttttttattatggtaaacctttatttggtattattcgttctcactatcttttttctctatatatgctaaatgatctaaaactttttatgtttgatttgcgcaagtggaaaaagttcatgcattttttgacgattttgtgacattaggtcgaaaaaaagatgaactttagaaaaaaataaagctaataagggcagattttgatagcataacaaggtagatagagaaaagattttgagaaagtacatttcagattcactacatcaataggaaggatggtgatcttcttgttcagagcatttaaaccgttacttttattagcgatgttggctgttgttttcgtactgggcggatgcagcgacatttccgttttagatccgaaaggacctgtagcagaccagcagaaagatctgattctcttgtcaatcggatttatgctgttcattgtcggcgtcgttttcgtactatttacaatcattttagtgaaataccgcgaccgcaaaggcaaagacagcggaaattacaagcccgagatgcacggcaacacgttcttagaagtagtctggacagtgatcccaattttaattgttattgcactttctgtgcctaccgtacagacgatatattcgttagaaaaagcgcctgaagcgacaaaggataaagagcctcttgttgtttatgctacttcggtagactggaaatgggtattcagctaccctgagcaggatattgagacggttaactacctgaacattcctgtagaccgtccggttttatttaaaatttcttcagccgattcaatggcatcgctatggattcctcagcttgggggacaaaaatacgcgatggcgggaatgctgatggatcaatacttacaggctgacaaagtgggaacatatgaaggccgcaacgcgaacttcaccggcgaacactttgccgaccagaaattcaacgtaaaagctgttacgcaaaaagactttaacagctgggtgaaaaaagcccaaagcgattctccaaagctgacgaaagagaagtatgacgaactgatgcttccggagaatgtcggtaaattaacgttctcttctacacacttaaaatacgttgaccacggccaagatgccgaatatgcgatggaggcgcgcaaacgccttggctacaaagccgtatcaccgcactctaaaacagatccgtgggaaaatgtaaagaaaaacgaatttaaagtatccgacgataaacaagattgaaattgaacaagaaaggaggaagcccgaatgaaattgagatgggatgaattttttgtaacaggtgacccattaattctgggcgcacaagtttccattgcgctttccactatcgctatcatcgttgtactcacatacttcaaaaagtggaaatggctctggtctgaatggctgacgtctgtagaccataagaaacttggaatcatgtacattatctctgctgttatcatgctgttccgcggcggggtcgacggcttgatgatgcgcgcccagttagcgcttcctaataacagttttttagactcaaaccactataatgagatctttacgactcacggtacgatcatgattatcttcatggcgatgccgtttttaatcggtctgatcaacgttgtcgtacctttgcagatcggtgcgcgcgacgtagcattcccttacttgaacaacctgagtttctggacgttcttcgtaggtgcgatgcttttcaatatttctttcgttatcggaggttctccgaacgcaggctggacgagttacatgccgctggcaagcaacgacatgagtcccgggcctggtgagaacttctacctgctcggtcttcagattgccggtatcggtacgctgatgacgggtatcaactttatggtgacgatcctgaaaatgcgtacgaaaggcatgacgctgatgcgtatgccgatgtttacatggacgacgctgattacaatggttattatcgtattcgccttccctgttttgacagtggcattggcgctgttatcatttgaccgtttgttcggcgctcactttttcacgctggaagccggcggtatgccgatgctttgggctaacttgttctggatttggggacaccctgaagtatatatcgttatcttaccggcattcggtattttctctgaaattatttcagcgtttgcaagaaagcagttattcggttacaaagcgatggtcggctcaattatcgccatttccgtcctgagtttcctagtatggactcaccacttcttcacaatggggaacagtgcgtctgttaactctttcttctcgattacaacgatggcgatttcggttccgaccggggttaaaatctttaactggctctttacgatgtataaaggccggatcagttttacaacaccgatgctgtgggcgctcgcgttcatcccgaacttcgttgtcggcggggtaacaggggttatgcttgcgatggctgcagcggattatcaataccataatacgtacttcctcgtatctcacttccactatgtgctgatcgcgggtacggtatttgcatgtttcgcaggatttattttctggtatccgaaaatgttcggtcacaagctgaacgaaagaatcggaaaatggttcttctggatctttatgatcggatttaatgtatgtttcttccctcaatacttcttggggctgcaaggtatgcctcgccgtatttacacatacggaccgaatgacggatggactgcattgaactttatttcaactgtcggagccttcatgatgggtgtcggattcttaatcctttgctacaacatctactacagcttccgctactctactcgcgagatcagcggagattcatggggcgtgggacgtacgcttgagtgggcgacttcatctgcgattccgccgcattacaactttgcggtgcttcctgaagtgaaatctcaagatgcgtacctgcaattgaaagaagacaaaacggatattcatccggaaagcaagttcaagaaaatccatatgccgcacaactccggaagaccgcttattatgtcagtggcgttcggtattgcaggcttcggacttgtatttgaatggttctggatgggcattgtcggcttgatcggcattctgctttgcatggtgcttcgttcatttgaatatgacaatggctactatatacctgttgaagaaataaaagagacggaaagaaagatttccgaataaaggaggcgtgatttatggaacatgcagaacacggcaattctaacgcgcctatggaatatcaatctgaaaccggcagactcaatattctcgggttttggatctttttaggggcagagattgtgttgttctcaacactatttgcaaccttcttcgttcttcaaagaagaacagcaggaggagtcttaccggctgaattatttgaagtgaagcttgtcatgatcatgacattcctgcttctgatcagcagtttcacctgcgggatcgctgttcatgaaatgcgtcgcggaagtttaaaaggcgtcgtcatttggacgatcattacgcttcttcttggcgcgggcttcgtcggatgtgagcttaacgagttcatccactatgtacatgaaggagcatctctcggtacaagtgctttctggtctggattcttcgtccttctgggaacgcacggaacgcacgtaacgatcggtatcttctggattgccggcatcttactgcaattgaagaaacgcggattaacgccgcagacgtcttcaaaaatctttatctcaagtttatactggcacttcttagacgttgtttggatcttcatctttacaggcgtctatctcatcggattggggggactataatatggcaaacaaatctgctgaacacagccactttccgtggaagcatatcgtaggttttgcgttgtctattattctgaccctgctggccctttgggttgcagtatatacggaattaagcccatcagcaaaactctggatcattttcggattcgcatttatccaagccggtcttcagcttctcatgttcatgcacatgacagaaagcgaaaacggcggaattcaagtcggaaacacgctcttcggatttttcggagcgattgttatcatccttggttccatctggatctttgcggcgcactaccatcacggtgaccatatggatggaaaccctcctggcggtgcgaagcatcattccgaacatcaggaataaaaagaaaccctcttcgtttatgcgaagagggtttttggtgcctttattggcttcttctccggcgcaggcgcgggaggccgtaaatgataaaggcggcgatatgggcaacgatgacgttgacggcaaacaggatgatcatgagtgtgtggccgagaggggataggctgctggttgcgtaaaagtagaagaaaacccacatgagaataattggcggtatggccgaaagagcgacttttttgttatccagccagataaagaggggtgttgcgctcgcgaccagtaaataagcaaaaaacatgtccatcttacatgtctcctttcattttatgggagcgtttccaaaatgaaatacagagaatgaaatgtgtctgttttgtggtcgttttttgaacattttgttacaattattataccatgttttccaatttttgataccgctttttcgagaaatgtattgcaactattgcctcatttttggataggtacaagaaaccggaaaggccaaataccctgtcacatttccggacaatggaatggcgcaggctgtgaacctttgctatggtcaaagaaaatatgcacagcaagggtggtttgaagtggacgtaaggaaagaagatgtcacagcgccggatgtctttgcgcttttgcaggatcatctgaagagcatgaccatgcattctcctccggaaagtatacatgcgctcaatgcggaccggctgcgtcagcctgacgttacgttttggagtgcgagggaaaacggcatcctgctcggctgcggtgccttaaaggagctaaacagccggcacggtgagatcaaatcaatgaaaacctctccgcatcatgtcagaaaaggcgttgccaaccggatcctccgccatatgcttgaagaagcaaggcggcggggctatcatcggatcagcttggaaaccggttctatggaggcttttctccccgccagacgcctgtatgaaaaagccgggtttcaatattgtgatccgtttgcacattataaagaggacccgaacagcttgtttatgacgttaaacataagctgaaaccccttttctgacgagaaggggttttttatcggaaaagtttcatcatgaccgaaacatttccttttctgacacgtcatatgtcgtgtagtccccaaaccgtaaaaaataaaaaggaagcaacctcatcatgttttcttgaacggtgttcatgtataataaacaatagtgacttccgatgaaaatgtaaggcgggatagaatgagtcgatataagaaacagcaaaatccctattatcagggggatttgatttttatatttggtgtgtttttaataattagtgttgcggcgatttatgcggccggacagttcgggcagtacggaagtgatgcctggatgagacagatcgtcttttatgtcatcggagccggtctcatggtcagtatcatgtattttgatttagagcagcttgaaaaactgagtctgtacgtgttaattgccggcgtgctgtcgctgctccttttacgtgtggcgccggaatccatcgcgccgattaaaaacggagcgaagagctggtttaaaatcggcagctttaccctccagccctctgagtttacgaaaataggaattatgatgatggtcgcgtccattatatcgaaggcgggcccgaaggatcaaaggtcacttagggaagatgtgaatctgcttttgaaaattgcggcatggacggttattccgatcgggatgatcgttttgcaggatgccggaacgggtgcgatctgtctgtttatcgttatggtgatggtgtttatgtcgggtgtaaactggaagctgattaccattatcggcggttcggccgcgcttgtgcttggccttttcttagttctcgtgattgaatttccccatgtggcgaattcaatcggcattgcggattatcaaattaaccggattacatcgtggatgtctgactccagtgcggcaacgactcaggcagagagcgataaaagctggcaggtggatcaggccgttatggcgatcggatcgggcggcattaccggaaacggcgttcataatctgaaggtgtacgtacctgagggacagaccgactttatctttgcgattttgggtgaaagttttggatttttaggctgcgccattgcggttgtcatgtttttctttttaatttacagacttgtggtgctgattgaccgcttgcatgcgtttaaccgatttggcgcgtttttttgcgtaggatttactgcacttatcgtgattcacaccttccagaacatcgggatgaatatcggcattatgccggttaccggtattccgctgctgtttgtcagctatggggggagctcggtgctttctacattaatcagcttcgggatcgtatataacgcaagtgtgcagctgacgaaatataaaagctacctgttcaattcttaatgtgagacggctcgtttttcgggctgtctttttttgtttagagcatttcgcttttgacatgattccctttcggatatgatatagagagaaggaggcttttatatgaacaataccattgaaaccatacttaatcatcggtcgatccgatcatttactgacgagcttctgacagcagaagagatagatacattagtgaaaagcgcccaggcggcgtcaacgtccagttacgtgcaggcttactccatcatcggcgtaaccgataaggagaaaaagcggaagctggcggcactggccggaaaccagccttacgtcgaaaataacgggcacttgtttgtgttttgcgctgatttgtaccgccataaaaaacttgctgaggaaaaaggcgaaaacattaccgagcttcttgagaatacggaaatgtttatggtcagcgtcattgatgccgcacttgccgcacaaaacgtaagtgttgccgcggaatcaatgggacttggcatttgttatatcggaggcattcgaaatgaacttgatcaggtgacggaagtgcttggaacgcctgaccatgtgctgccgctgttcggcttggtagtcggtcatcccgctcatccgtccggtcaaaagccgcgcctgccgaaacaagccgtatatcatgaaaacacgtacgatacgaatgaagaacacttccgcagttatatgaaggaatatgatgaaaccatttccgcttattatgataaacggacaaacggcaagcgggttgaaacgtggtctgatcaaatcctgcagttcatgaaacaaaaaccgagaacctatttaaatcaatatgtaaaagataaaggttttcaaaagaattaagaaaaaacctctcctgacgggactgacccccgtttttgagacagggatcaaaacacctttaagcagccagctgtcggtatgtgaccggcggctggttgtttagtttcgtttgaatacgaatgttgttataatagtgtatataggtttcgacagtttgttctacgatggtcgtcgtagtgctttccaacctgtcgaggtagaacgtttcagactttagtgaggaatgaaacgattcgatggaggcattatcagcgggcgtccctttgcgggacatgctcatggtaatgccttttgttttaacagctttctgatactcgtaagatgtatacacagaaccttggtcactatgtaacacgcagttctcaggcagtgcgggcagctgatcaagtgtgtgtaagacaaagtctgtgtcctgtctatcgccaatcgtaaaagcaatcacttctccattgtataaatccaatatactggaaagatacaattgtttctgcccataaggcaaatatgtgatatccgttactagcttttccagagggcgatcagactgaaagttccgatccaatatattctcggccacggcatatggctgcccattcttcttgcgctttttcaccttaacccggcattgccactgattcttctgcataatgcgctgaaccgttttatgattcatacgcattcccttttttaatatggctgtgattttccgatagccatatcgatacttgtgttctcggcacaacgtgccgatttgtttttccaaatggcgcttgggatgatccttcatcagattcttcttccaacgataataagacgctcgagagatacctaaatgaatacagatatcctgtacggtcattgtgctgtgcaatatttctacaagttcgactgacgtttcgctatcaacttcctttccaattcgttgtacttttttaacacttcattctgttgtctcagataacgattttctgcctgcagtttctctaattcggaagaatactctggaccttttccgtaagtgtattgctttccaacaggctgttcgaatcgatgtgtatcaccagccttataccatctaacccatgtctgaacctgtgtcttattcttaatattcaactcctgcatgatctctttcataggtacgcctgccaatctcatttctacagccttctgtttcgcttcaaccggataactcactcttgtccccatagaaaaaacacctccaagtctaatttcggataacaatcatccgtattcaaacttgaaggtgtttttatttgtctcatcttatggggtcagtcccaccgggagaggtttttttatgtttcacgtgtaacatatttcgacaaaatggaacaaggtatataaatgtttatcatcagggatgcttataagcatacagaaagaaaaaacggcttagcagtggtacgatgttgatgaggtgacagtgatgatttcattaagcatattagatcaatctcctgtatcagaagggagttccgcggaaagcgcgctgcgggatacagtaagactggcgcaggaggcggaaaagcttggatataagaggttttgggtgtcagagcatcatttttcagagcggttggcgggttcaagccctgaagtgctgatcagccatattgcggcgaaaacgaatgagattcgtgtaggctcgggcggtgtcatgcttccgcattacagcgcatataaggtggcggagaatttccgcgtgcttgaagggttgacgccgggcagaatcgatctcggattagggagagcgccgggcggaatgccgatcgcatcatgggcgctgaatgacggcgggaagcgtaatgctgatcaatatccgcagcagcttcgtgagctggcgatgtatttgcatgatacagctgatgacaatcaccgttttccgaatctgaccgcatcaccccttattaagacggcgccggaagtctggcttctcggttcttcgggggaaagcgcgcttctgagcgcagaaatgggagcaggctatatgtttgcccattttattaatggagaaggcggagaaagcacgacagcacaatataagcgcagatttaaaccttccgcattaggaaaagaaccaaaaacggccgtggctgtgtttgtgctgtgcgcggacacggaggagaaagcggaggaactcgcggccgtcatggattatacgctgcttgcgggtgaacaggggattccgcttcacggcgtaccgtcttacgaaaccgtccgcggaaatacgtatacaccgtatgaacaaagacgaattgccgataatcggaatcgaatgatcatcggaacgaagccgcaagtgaaagaacagattctggctctcagtaaagcatacggaacggaagaagtgatggctgtaaccattactcatcattttgaagataaacttcagtcataccggctgcttcgtgaagcttttgccgaatgatcagaaagaaaccctgctgatgctccagcagggttgttcggttattcaatgataaaaggtttttcagtcagcacctggcttgatttccctttgttcgcggcataggccagcatataatattctcctgccggcagtgcgctgtcaccattgactttgccgttccagtcgaaatattgatagcctttatcctgctttttgtagatgccggcttggccgacaaagtcaagattgctgtcatatacaaggaaggcaagctcttcggctcccgccggaagataggtttcaatttggtaggttccctgcgttgtgccgtcctgcacgtcgattgacgtcacgcgcggatagtccggctcttttacaatcagcagcgtcggcacttttgcaactgtttttccgccttctcgcactgtgacggttccctcataggtgcctgcctttacttttttggcattgacctttactttcgcattgacctttccggtttgatgagcggggatcacgacccggtctgtgcccgaaacggtaatgcccctgccgttgaaagagtactcgagctgatatgattttctgatggacgattgattttcaatcgtaaaggtttcttttttcgtttcattgcctttgtctttcataaacgttccgtaagaataacttcccggggcgacaagggagtctgctttgatcgccttcatgattctgatgcttccggcaccttgcgcattatgcgggtatacgtcaccgtccgcgtccgttaaggtttccgccgtgttcatgagagcggcttttatttgttccgggctccatttcggtttggcctgcttgatgacggcagctgcgccggctacatgcggggaagccatgctcgttccctgcttcgatccgtagccgtacgggtcggccggatcatgggtcggaatggtgctgacgacgtttacgccgggggcggagacgtcaggtttaatcatccacgtgtccataaccggaccgcgtgacgaaaagtctgccatttgttcagtgagcgatttagccacggataaattgaaagtcgcttttgtgccgcccgcttttaattggctgacgagtttttcgccgtcttctgatgaaagcttaatcgtcggcacggacatgcccggtacgtttgcttcaatttctcccggggcattgttatacacaaccataccgatcgcgcccgcttttttggcgttgtctgctttatccacaaaggcgatgctgccccgtttgacgacagcgacttttcccttcagatctttgccttcaaaatccttttgctcgccgatacccgcctctatgagctctgtttcttttttattcagtgcttttatgtcatcttctttgttgtagcccattactttcgctgaggaataggaaccgaaggacacggcgtactcgttcagcggcagctgggtcgctccgacggagatggcttctctggacgttcccggagagccgacggtccaattgttcggcccgctgtttccgtttgatgtaacggccgtgacgccttctgacatcgcccagtcaagcgccgtgcttgtcgcccagtctgggttattcacagaattgccgagagaaaggttcatgacatccgctccgtcctgtacggcgcgttcgatgccggcgatgacgttctccgttgttccgcttccgcccggaccgagcacacggtaggcaaggagtgtagcatccggcgcgacgcctttgatcgttccgtttgccgctaccgtgcccgcgacatgggttccgtggtcagtcgacgcgcctctcggatcaccggacgccgtttcttcaggatcgtaatcgttatccacaaaatcgtatcctttatattgtccgaaatttttctttaagtcagggtgtttatattcgacaccggtgtcaataatggcaaccttgacgcctttacccgtatagccgagcttccacgcgtcatttgcccctatataaggcgcgctgtcatccatctgcggagacacggcatccttagatagggtgatgtctttatctttgagctgatcggtatgataggtgacattcggataaaccgctttgacatcctgatcactcagcagtttggggatttcatttgccgggagtttcatggagaagccggaaaacacttgctcatattccctgttaatttttccgtgtttaatggttttgagcgctttctttttcacttttgcgcgttcgcttttcagcctgctttttgtctgtgctttgccgagttcctttgcttccgccagtgacttttccttcagctccacgatgactgtcgtttgtttgccggtggtcatatcaatgtcaccgaacacctcagccttctcaagatcaggagtttgcggttttgaagccggcgcagcctgtgaacttgtggataaggtaaaggataagacaaaagccggaagcagataacggatgattccttttttcaatcgtgtttcccccttttttctttatctaaattagaaatctagtatatatttcttgaaaattcaaaataatccttgtgacatatgactcatttatggaaattggtctgtgaataaggagggagttatacacagaatcctgtgtataactgaataaatttgtgtatatatattgttgggaacgagtgttcctatacaaaatatagatcgagtttgtggatatgtggatatgccctgtgtttaagctgtgcttaaccaagggataaggtgtgtataactttttttatcggcttttccatttttcaggtcatttccatcagctttcaacaaaacttctgaaaactagtttgttttttcactcatattgtgacaaacaattcgcccggccgcgtctatcatagagtcatagggttgctagacccgctagtttttagcggagaaggatcggccgccttttccgttaaagcggagagaaaaacaggcctgcgaacaagctgtctgtcaaaaagaagcggagggatgatttgcaatgaaacgtttgctagtatctttacgggtgtggatggtctttctgatgaactggatggcgccgggtaacggaagatatccattagccgccgtgtacggaaaccaagcggcttatcataagaaagcgaagcggacggctggggctttttcgtttgtgagccgtgtccgatcggcggatttgaccgatgaaacgaaatcggcccgcggcaggctggataaaaaccgatggatgcctgtccgcaaagaattgccgaaacgggagcgcgcgggtccggcacctttacatcatatgaaaaagagggtacaatcccactaaacatatgaacgggagcgaacctcttgagaatagacaaagtattaaataacaatgcggcgttaataaaagaagacggacgggaaaagatcgtaatgggtcccggaatcgcttttcaaaagagaaaaaatgatgtgattcaaaaacataaaattgaaaaaatatttgtcgtgcacgacgaaaatgaaaagttcaaacaagtgttagaaacgcttcccgaagagcatatagaggcggctgaagatatcatcagccatgcggagggagagcttgcggcacctttgagcgatcacatccacattgcgctggcggaccatttatcctttgcgatcgaaaggattcaaaacggccttcaggtgcataaccgattgcttcatgaaattaaggcgctttataaaaaagaatatgagatcggccgctgggcggttgaacacgtgaaacaaaccctcggtatatcattgcctgatgatgaggcggggtatatcgcgcttcatatccacactgccaaggcggatgccaaaagcatgtattcggcgatgaagcatacaaccatgatcaaagaaatgatcgaaaagatcgaatcctttttcgaacagaaggtggatgaagacagtatttcctatcagcgcctcgtcacgcacttacggtatgcggtcagccggttggactcaaatgaagcactccattccatggacgaggagatgctttatttcatccaaaaaaagtatccgtttgcttatcggtgtgcgcttgaactggcggcgtttttaaaaactgaatatgatttggagctgccggaatccgaggccggctatatcacgctgcatgtccagcgtctgcaaaaaaacccggaataacgcgtctgtttcgagaaacagactttttttttgaaaacatattgacgaaagcgctatcatgaaatagaatgaaagcgcattaaaaaaactgaatccggcgggattgtgactggtaatgcaggcaagacctaaaatttgcgtacatgaaaaagggatcatgctgacctttttcgttggcgaattttaggtcttttttgattttagaaagggggatacatcatgaattatcaagaaacggcaaaacagcttatcaaacatatcggaggggaatcaaatgtcatcagcgcgacacattgcgcgacgcggctcaggctcgtcattcaagatgaacagaagatcagccaggccggcattgaagaaatagaaggcgtaaaaggggctttcagcagctcggggcaatatcagattatattcggcaccggcctcgtgaataaagtgtatgacgctttttcaaaagaagccgatttggggcgggaagatcgtgagacacatcaggacgcagcgaaaaaaaagctgaatccggccgcaagatttgcgaagacactgtctaacatattcgttcccatcattccggctatcgtggcaagcggacttttaatggggctgcttggcatgatgaaggcttttcactgggtgtctgaacaatcatcgctgtttaagcttttagacatgttttcaagcgcggcgtttatcttcctgcccgtattcatcgggttcagcgcggcgaaggaatttggcggtaatgcctatctcggtgccgtgctcgggggaattatgatccatccggcgcttttgaatccgtgggggcttgcggatgcatcgcctgattttatgcagctcttcggcttcgacattgcgctgctcggctaccaagggacggtcatccccgtactgttagccgtttacattatgagcaaagtggaaaagggcacgagaaaaattgtgcctcacgcattcgatttattggtcacgccgtttgtcacggtgattgtcacaggatttatcacctttatcgcaatcggtccgcttggcagggcgatcggatcaggcattaccgtctcgctgacatatgtgtatgatcatgcgggcattgttgccggactgcttttcggcggtctttatccgcttattgtgcttaccggtgtgcatcacagctttcatgcgattgaggccggcctcatcgctgatttgggcagaaactatatccttcctatctggtcgatggcgaatgtcgctcagggcgcggcgggactggctgtatttttcctgacgaaaaaagcgaaaatgaaagaaatcgctctgccggccgcattttccgcttttctcggtgtaaccgaaccagtcattttcggtgtgaacctaagataccgcaagccgtttatcgcgggaatgatcggcggagcgctgggcggagcctatgtcgtggtgaccggtgtcgccgccaatgcctacggtctgaccggaattccgatgattgccatcacggctccgctcggtttaggaaatcttataaactatctgatcggaataggcatcgcctctgtctcggcgtttattgccgcttacattatgggagctaaagaaaaggaggccgtcaaatgaggacaccggatcaagagctgcgcctgcaggctgaggaagcgaaaaagaagcggggagaaacagccgcgtcagatccataccgccagaactatcatattatgccgccggtcgggcttttaaatgatccgaacggcgtgatccaatggaacggcgtatatcacttgttttttcaatggcagccatttcatacggggcacggcgcgaaattttgggcgcatgtgacgacgaaggatttcgttgagtggaaagaggaagaaatcgcgcttgcaccgggtgagtggtatgacaaaaacggctgctattccggaagcgccatcgaaaaagacgggcggctctgcctgatgtacacaggcaatgtccgtgacggagaaggcaatcgggaaacgtatcaatgcctcgccgtatccgaagacgggatcgtatttgaaaaaaaaggagttgtcgcgcgtctcccggaaggctataccgctcatttccgtgatccgaaggtttggaagaaagacggagcgtattacatggtgcttggcgcgcagacagaaaaactcaccggaagcgctgtgttgttcacatcagagaacttgacggattggacgtttctcggtgcgattgcgggggcggactccggcggtctcgggtcattcggttatatgtgggaatgtcccgacctgttttcccttgacggaaccgacgtgctgctcgtatgtccgcaggggcttgaagccgacgggatagaatatcataacagccaccaggcgggctatttcctcggcaggctgcatacagagccgccagaatttaagcacggtgaatttacggagcttgacagaggatttgacttttacgcggcgcagacgctggaagatgataagggacggagaattctgttcgcgtggatgggcgttccggatcagcatgaggacaaacatccgacacatgcgtatcactggattcactgcttaacgatgccgagacagctgtcactgtccaacggcagaatcatacagcgcccgctttcggaaatgaaatcacgccgcacggatgaacaaaagcaccgtcttcaattgaattgctcgtctgtaagcctcccggtgaaagatgcgtcccgggctgaagtgctgctggaggacatcacttgcgaatccggttttgaaatctcaattcggggcgcggcccggtttatatttcatcaggaagaggggctggctgtgctggagcgcaccgctttcagcggagaagaaaaagaaaagagaagctgctccatcagcgaggtgcattccgtgcagctctttctggatgcatcctcgattgaattgtttttgaatgatggagaagaggtattcagcgccagatattttcctttcccgggaaatgatgacgtaaccgtcacttcggcaggaaaaacggaaataaatggctcgatttggacacttttgtagaaaatcgttcttttttcttatgtgaaacctatgccatctgtgctattcttcaaacgaaagcctatgattccaggaataaaaggagttgttttctcagttttgaaaaatcagaagatgacgccgaaatgtttacttgtcaaagccgcagagcaagtggaagataagcgggaagaatataaagaagtattgcttcagctgaagcgcatgctcaagagagctgagccgcacaatgaatggagtgatcggctgatgcatacatatgaacagatgaaggaatatgcgctgtttgtgcagtctattgagatgtttttgcggtcatccgcgaaaaaaatgaaataatccccctcgggtaatgagggggatatttattttattttccgctaagacgcatcgccgaatgtttagtcggtccgatgtattggttcagcgggaaggattctttgattgccgcggtgataaattcttttgccgcatagatggcttccttcacttcagcgcctttggccagttctgccgtcacggcggcggagaatgtgcatccggctccgtgcgtgtaaggtgtatcaatcatttcgctttctaatacttccgcggtttctccgtcatacagcacgtcgatcgctttttcatgtttcaatttgcctccgcctgtaatcaatacatatttcgcgccgagttcgtgaattttcttggccgcttctttcatgtcttccaccgtttttaattcatccataccgctcagctggcttgcttcaaacaggtttggcgtgatgacggttgccagagacgccaattgggtgcgaagcgcttcggcatgctccggatacagcacttcgttcgctcctttgcagaccatgacaggatcgataacgacattcttcagctgtttttctttaatcgttttcgccgcaagctctatgatctccacggtagggagcattcccgttttcatggcgtctacgccgattccgtcaacaatcgtcgccagctgtgcgcgaatcgtatcggcatcgatcgggaatacttgatgatcccagctgttctccgggtccatcgctacgatcacggtcaaagccgtcattccgtatacgtttttttcttgaaatgtttttaaatcggcctgaattcccgcgccgccgctggaatcagaaccggcaatagtaagtgctttgtgcattgacatatcaatggcctccatcagtgttttatatctcattatagttagattttcttccgatcacaatacggaaggcttggaggaatgatttgacagccgcgggggatgtgcgtacaatacctacataagattactaggtaagggtgagaaaataaatgctcaacagggagcttgtaaagggaagcacggtcattctggtgctgacgctgctgaatgaacggcccatgtacgggtatgaacttgtgaaagaaatggagaaaagaagcgggaatgaactgcaaatgaaggaaggcacgctgtacccatcgcttcataagcttgaacgccaaagctatatttcttcttactgggaaaagcagaccaaagggccggaccgaaaatattaccggatcaccgatgaaggaaaaaacattctagccgaacggacgaaggaatggaatctgttctctgctctgatggaccggatgctgaagcggggcgggcagaatggataaagacctttatgtgcaggaaatcagaaaagggctggaaggcaaggccggaagccgtgaattattaaaagaaatcgaaagccatattcatcatgccatttgtgatcatctggaaaaaggcaaaaccgaaagcgaagcgatggagcttattctgcgggaagtggggactccgtctgagattatctctgcttttcaaaaagcttcggcggtgcccgcgcggacttttatgctcttttatctgttctgcaactgcggtctttttgtgatgggggcgatgattacgatgatgcacgcgtggaggattcatcccgctgttgacgcgctgtggaaagggatttccgtgtcagtatggctgattatgatcggttatgtgctgtattggttccaaatcggctatcaagctggcaaagagttcggggctggcggcaaaaagcttgctgagcggacggtatgggcttcaattgtgccgaatctatgttttatgtttgtcttcttgttcaatctggttccggctgggctgtttccttcggcggtcacaccgagttttgcggcagtatgcgccgttgtgacggtatgttttccgttttgcggaaaaataggtttttacgcaggcaggcagagacttgcctgatctttttcactatatacatagggaatctatataggggtgttaaaatgagattaggttcgtggatgtacggcgcgtgcgcccaaatagccgtaaccgtatttaccgtctgcagcttggttcttgcattgcccgttgtgagtctttttattatggttctgaatgggatgcaagacgctgtttttgttgttttcagtattttgcttcttctattattttatgcgctgggatggatttgggccgtttcgtttgcgcgtgagtggaaggtgaaacttttcgagctgcagatcagttcgctcattccgctggcgggtatattatacttgtacattgacagcggggtgagtataccggaactgattcatgattggggtgaggatggatgtgcgcttgtcccgccggcttttgtctgcttgtgcacaagctatgcgatggtgttggtgcctgtttatcaatcaaaactttggaacgccatggaggcgggcagacttaatgccaaggcggtatgcactgtttggggagaccttctgatcattctcgttttgctggcgggcatgacctggatttgtttctgaatgggccgaaatcaaaaatcccccctgatctctccgccgctttatgttttaatagaacatgagaaaaagcagaaggagcggatcatgaatatatcaattgtcatagtcacgtataatcggattccggctttgtgtgagctgctggagtcgatttccatgcagaccataaagccttatgaagtgatcattgtaaatgatgccggggaatcggtcgaacaagcgaagcagctgtacagcgatctgccgattcagattattgatttagaacagaatgccggacatgtggaagctcggaacgcaggtgtgaaaaaagcgtcgggtgattgtatcatgctgtgcgatgatgatgatttcattacgccgggccatttggaaagaatggcggctgcacttgctgatgcggattttgtccattctgacgcggaaattgtgtcatttgaagaacggggcggcacgagatacccggtgtcacgaaagccgttcgcctatacggcggattatgcggatatgcgggtattttccacgtacgttccgtcaggcagcatgtacaggcgttctctgcatgacacgttggggtattttgatccggatgtccataattattgggactgggacttttatttgcgcgccgcgaaacagcaccgtgtgaagcgtgttccttgcgcgagcgtcatatatgcgttttttgagggaggcggcaatcagtccgcggatctcggcggcaaaaggaagcggtacttagaccggttaagcgaaaagcacgggcttggagaactcccgacgaaaaactttgcggttcttcttgaagagccggacatgaagaggcgggaggcgccgactgacattgtgtgggacggaaagcccgtccattcaagactgcacagttcataagggggacggacagtttgaaacagcttttaaaagacagctggtggaatcagctgaaagatgaatttgacaaaccgtattatcaagagctgagagaaatgctgaaacaagaatacagcagccaaacgatttatcctgacagccatgatatttttaacgccttgcattatacgccctatgaggatgtaaaagcggtcattctcggacaggatccatatcacgggccaggacaggcgcacgggcttagtttttccgttcagcccggggtcaggcagccgccgtctttgaaaaatattttcatagagcttcaggacgatatcggctgctccgtaccgaaccatggatcgctcgtcagctgggcgaagcagggagtgcttttgttaaacacagtgcttacggttcgccgcggtcaggccaattcccacaaaggcaagggatgggagcggctcactgaccgcatcattgatgtggtgaatgaaagagagaagccgattgtctttatcctatgggggcgtcacgcgcagatgaaaaaagagcgcattgacacatcgaaacacattattattgaatcgactcatccgagcccgttttcggcaaggaacggttttttcgggagcagaccgttttcccgtacaaacgccgcccttgaaaaaatgggggagcagccgatcgactggtgcatccccgacctgccgcaataaacggttttttgaggcgcttccgcccggcggtaagcgccttttttggcgttcagggcggtatgccgtcagaaaaaataacaaactcaattctgcgattcgctcagaaatttgataaaatgcaggaagaagacaaattactgctggaggatttactcatgaacatacatatctctgctttgattcagaagatggaagaagaactgaggcaggcgaaaacggcgacccgcaccgaggaggtcaaaatgcacgcggctgccatccgctctctgtgtgatgtcgtgctcggcactcagacgcacaccgctccggcgccagtgcagaatccgattccgaaagcggcgccgaaaccttccgcgtctccttcgacagacccgctgctgcttgaaaaaatgatgggcagcgccgggctgaaccaatatcagaaaaaagcgaaagacgaacgtgaggaagacggaaacggggattccattttcgatttttaacaggagaggttgattgacttgaaactgatactcgggggtttgcaatggacggcatttatgattgcggctgcgattgtagttcctgtcgccatcgcacaatcatttcacttgaaccatgccgattctgccgcattgattcagagcacattttttgtgcttggcgtcgccgcggtcatccaatgtctccagggacatcgtctgccgattaatgaaagcccggcaggcttatggtggggcgtatacacgatttacggcggactgactggcacggtgttcgcgacattcggcgagacgctgcgggcgctgcagggggcgctgttattaagcgctgtctttttctttttgttcagcctttttaaagtgattgaacggctggccgtgctgtttacgccggttgtgaccggtgtgtatctgctgctgttggtcatgcagctgagtcagccgattgtgaaaggccttttgggcatcggctatttaaaaaacagcgtcgacggccttgtattcgggctcgccatggttgtgacggcggcgatgttcatcatgtcccgatcgaatgttacgttcttaagacagtatgcgattctcctttcgcttgccggcggatggatcttattcgccgtcttcggcgctgccaaaccgattcaaataccggaccgcgtgattcagctgccggctctttttccgtttggaaaacccgtgtttgacagcggcctgatcattacgtcacttttcattaccgtgcttttgattgtcaatatgctcgcgagcatccgggttgtagaagcggcggtgaaaaaattcggcggcaccgtcgggaaacggcgtgagcgtccggctgggtttgcggcttcgatcagccaccttttgagcggactgtcagggggcattgcgcctgtgccgatttcaggggcggccggttttattgagacgacgaagcttccttcgaaaaagccgtttcttttgggaagtgtatttgtcgtgatcatcagtatgatcccgctatttatgaatgcgtttgcgagtctgccctcaccggtcggctttgcggtaaacttcgtcgttttctccacgatggccggtctcgcctttacggagtttgactcttatgagaaagcggagcaaaaacgaatccgctccattatcggtctggcgctcctgacgggggtcggcgtaatgtttgtgccggagagcgcgttatcggggatgcatccgatcctgatttcgctcttaagcaacggtcttgtgctcgggacgctgctggcgatagcgattgaccgaatccagcttatcaaaaagaaaaaatccgacaatctcgtgtcatcggacggcggacgttgaattttgccgatgttgggttatgattgaattggaaactttaacgaaaaggcgggagaaaaatagatgaaagtgtttattattcttggtgcgattaacgctttattggccgtggcgctgggcgctttcggcgcgcatgggcttgaagggaaaatccccgataaatatttacaggtgtggcacacaggcgtgcaatatcatatgtatcacgcgctcggtcttctggctgtcgcgtttttgaccgaaaagctttctggcgcaggcagtgtttctgttgcgggttggctgatgtttgcgggcatcgttctgttttcaggaagcctgtacgtattgagcgtgacgcagatttccattctcggcgcgattacaccgctcggcggcgtggcgtttatcatctcttggattatgattatcgtcgcggccgtcaaatatttataaagaaaaaaagccaatcctctgtcaaatgagcgattggctttttgatttatctcggagaataagaagacatggagtacggataagtataagcgatttcctcatcaaacgtgatgtaatcaaggtaaatggtcagaagcagatagcgggtgcccgttttcggatcgctgatgatgatatggtcacgtcccgccgcctgaatcacaccgcggaaaatctttgaattccattctttgctgttttcaaatgtcatataaatcgtcgctgttttgccccggttcaaccgcagaatattttcaatgtatgactcttcaatcggcagcatgccgggaacgttttgtgacgatgatggacctgacggaatctgaaagctgccgccgccctgctgctgcggctggccggggaaccccccgccgaagctctgctggccttgctgcatcggcattgtcatttgctgctgcatcggcatcatttgtgatccttggccctgaggctgcggataaggattaggcccgagctgcggctggtatccttgcatatccattcccattcccatccccatcccctgcatttgctgatattgattctttttcggtttcatattgttcctcctttgatgaaaacctcttgatgctgaaacctcctgacaagtatcagacagccgacagagcggctgctgtttttatctattccaccatatgagcccaaagaaagatttatgcgaaaaaagaaaatacgctccaatgagtccggacatcagagccggctttttttgtgcgcgcaatgctgacttttcacataatagtctgtattcctagcgcatcttccgcataaggaacatatgatagcggtagtttcaggtgcgaaaagggggtgacgagttgcctaaagtgtcagtgatcatgacgagctataacaaaagtgactatgtggcccgctctattaaaagtattctgtctcaaacgtttacggactttgagctgttcattatggatgacaactcaaatgaagcgacattggcggaaatacgtccttttctcacggatgaccgcgtccggttttatcaaagcgatgtatcgggcgtcaaagaaagaacggaaaaaacacgctacgccgccttgattaatcaggcaatagaaatggcggagggcgagtacgtgacgtatgcgaccgacgacaacacgtatgtgccggaacggcttgagaaaatggtgaaagagcttgatgaagacccggaaaaagccgtcgtgtattcaagttccaaaacctatcatctgaatcagcggaaagagacggtgaaggagacggccaggcccgccgaacggatcgtgtggaacgcgccgtgcgccattgaccattgttcggtcatgcaccggttttccgtgctggaacaggttaaatcggcattcggttcctattgggatgaaagcccggcgttttaccggatcggtgacgcccgtttcttctggagagtgaatcatttttatccgttttacccgatttctgaggagcttgatatcaattatattaccgatcaatccatccattatcagcttttcgcggcggagaaaaacgagtttgtgaacagccttccgcagcagaccacgtgccgggagctgagggaatcattaaaaaagcttggaaaggggtgagggcttgtcggcatacttagcgaactattgggtgctgtaccggcagtatattgacctttttcagtcacttcgctacaaagacatcccgctcgcattgatcagtaatttttatcaatatatcagtccggcgcttcgggagagcatggagcagaacccagagcttttcggtccggctgatcagcatattcctgaagccggtatacagccatattatgatcaaaaaaggcaaaacattaagaaaacagatgagaaaccggtaaacggaaaagtcattctgcatttcgatcatcttcggttcaccgagggaaactaccggcagtttgacccggcaaaaacagcggtactggccagatggagtctgcctgaccattacgggctgcccgttatctgcaaattggagctgacgggaatggggcaaaaagggaaccccgtcccttatattgaaaaagcacattccattttgaaagagcttcacagccatcccgctttcggaaacagagaatttcaggaacgtttgtataaagacattccattatttattgaagcgattgacgccattgatattttgtttacggccgaaaagatttccgccgttgtagtcggcacgacggaggatatttacagccgtgtgctggcgctgatgtccgcgaaaaaaaacgccgtcagcatctgtcttcagcacggagcgctcatgggagatgaagcgtttctgcccgtgtttacggactatcaggccgtattcggggcttatgaagcggagtggtataaagcaaaaggctgcagggatgaacaaatcatcatcacggggcatccccgtttcgacgagattttctcaagagagccgatagatcaggacacgttttaccgcaaactttcttttctcccgtcacagcggacggtgctgatcgccacgcagccgttttctgatgaattttatacgggcgtgcttgaagagcttgccggccaaaagaacatgcagctcattattaaaccgcatccatgggaaatcggcaaaaacaagctggatgcttacaatcaggtgctgcggaaatataaagcaggcaaaatcatcaaaaaagagatggagctgtatgatattctcccgtatgttgacgctgcggtgacacagacatcaacggtcggtcttgaagcgatgctgtttcaaaagcccgtgctgatcggaaaatcagcgggaacccgcagatacccttattatcactcacttggagaatttgtctttgaggacccgcaggcacttgctcaggaattgatccggatatgcgaaagccccgcagaatatcaaaaagcggaacaggcgcgccgtgcttttgtcgccgcgaactacccggttcaggattcgcttgccgctttatgccaagtgcttcaggaaaaaaccggagtcagcttcagacgggttgacccttcataaaaaagataggagcgcaaagaaaatggtgcaaaaaagatcagcttttcttccctattcattgcccatgatcgggaaggacgaaattcaggaggttattgatacgcttgaatcgggctggctttcaaagggaccgaaagtagaggcgtttgaaaaagcttttgccgcctggacgggggcaaagcacgcgatcgcgctgaactcatgtaccgccgctttgtttttggccctgaaagcgaaagggatcggtcccggcgacgaggtcatcacgtctgccgtgacgttcagttcaacggccaatacaatcgtgcacacaggcgccgttccggtgtttgttgacatcgatccgctttcgctgaatgcggaccctaaaaaaattgaggcggccgtcaccccgcggacaaaagcgattgtacccgttcatttcgccggccagtcgtgtgatatggatcagattctggccattgccgaaaagcatcagttatttgtcttagaggatgccgcacatgccgtgtataccacgtataaacagaaaatgatcggatcaatcggcgatgcgacggcattcagcttctacgcgacaaaaaacctggcaaccggtgaaggcggcatgctgacgacggacgatgacgggctcgccgatcagatcagggtgctcagccttcacggcatgagcaaaggcgcgtggaaccgctattcttcaaacggaagctggtactacgaggtcgaaacgcccggctataaaatgaatatgtttgatcttcaggcagcgcttgggcttcatcagctgaaacggattgacagcatgcagcaaagaagagccgacattgcgagccgctaccaggacgccttcagacacatgaaagggctgaccatcccgcatgtcagtgatgacgggcggcatgcatggcatctgtatgttcttcaaatagaggagcaggaggccggggtcagccggaacgatctgatttccgctttaaaagaccaatataatatcggtacaagtgttcattttattccggttccgttccatccgtattatcaaaaaacgtacgggtataaggagactgactttccggccgctgcagcgtattatcaccgcaccgtgtcactccctctttatccgtcaatgacagatgacgacgttgaatacgtcattgcagccgttacggatatcgtcaaaggggctgattaggtgtacagactgagggaaaatcttgcgcaggacatgattcataccttcctgcatcagaagggcattcagacggaagcctatgaatcgtcgctctgtttattggaagaaaacagccttcaaggcgtgattttatatgaaaactcttcgtgggaaagtcaattgttccgaaaaaatatcatcaatgtgaagcttgcagccgcaaacagcgccggacagctcaaaaggctgtttcaggaattttacgcggcaaggcgggcggacggcactgattttatatttattaaaataccggctgaagatatcggcgcgatgcaggtcgttcagcagcttccgaacgcttattttgtagggagtctgctcaagctcgtcagtccggtgcgtgtatataacagcacaccgccgtttgagattacagaagccggacccggcgacacggaagcgatcagccggctggcccgcgacgcctttacaaaaagcaggtattaccaagatccccgcctcagctatgaaagtgcaaaccgcctgtttgaagagtgggcgcggaataacgcggaaggcagagcttcgttacaattcgccgccacatataagggagagaccgtgggctttattcaggggctgtctaaaggcgatgaattcgtccttgatctgatggcggtaaagccgggctttgaagggaaaggagcgggattccatttagcggcgcacattattgaacaatcattgcgctttcagcataagactgtatcagcgggaacgcagctccacaatgtaagagccatccgcctgtatgaaagaatgggatttaaagcggatgcgtcctattactactatcatgtgtggcccgggaaggaggcggactgatggcatcatgccaaatcggaacgaagtcaatcggcgaaggttcgcccgtattcatcatcgccgaagctggaattaatcatgacggaaaactgagccaggcgtttgaattgatagatgcggccagtgaggccggcgcggacgcggtcaagttccaaatgtttcaggctgacaaaatgtatcagaaagaccccggcttgtacaaaaccgctgcgggaaaagacgtctcgatattttctttagtgcaatcaatggaaatgcccgctgagtggatcgaaccgctgcttgaatattgtaagaaaaaaggcgtgctgtttttaagcacggtatgtgacgaaggctctgccgacttactgtatgcgacttccccttcagcttttaaaatcgcctcctacgagctgaaccatctgccgttattgaaatatgtcgcggggctgaagaccccgattatcttctccaccgcgggcgctgatatttcagatattcaggaggcttatcaaaccattaccggcgaggggaacaaagaaattgcgatcatgcattgtgtggcgaaatatcccgcgccgcctgaatacagcaatctgagcgtcattcccatgcttgccgccgcattcccggatgcagtgatcggtttctccgatcacagcgcccatccgtatgatgtgccgtgcgcggcggtcaggctcggagcgaaactgattgaaaagcattttacgatcgataaaaacctgcccggtgctgatcactccttcgccctcaatccggatgaattaaaacaaatggttgcggcgatccgctcagttgaagcggagctgcggcaggggcatcacgcttcggtgccggaagtgctgtcgggaagctcccataaaaccacgacaccgattgaaggagatatcagaaggttcgcttacagaggcattttttcaacagcgccgattcaaaaaggcgaatgttttacggcggaaaaccttgccgtccttcgtcccggccaaaaaccgcaggggctccacccgagatattttgaacttttaactgacgggacgcgtgcggtcagggatatccccgctgacacgggcatcacttgggatgaccttttgacgaaaggcagcccatatgatgactgacattttgtttatcattcaggcgcggatgggaagcgggcgtcttcccggcaaagtgctgaaaccgatcggcgggtatacgattctcgatatgattgtcaaaagggttcggcaaagcgcgtattatgatcaatcgcgggataatctgatcgtcgccgcgtctgacagcaagaccgacgacattctgtctgcgcactgcctcagcaagaactaccgtgtgcaccgcggcagcgagcagcgcgtgcttgaccggtttgcacaagtcatcgaacgagtaaaaccggacatcgcagtcagactgacgggggataacccgtttgtcgacccttcgctgcttgattttctgattcaatcgcatttagatcagcacgcggactacacgtatatctgcggtacaccgcttggcatcggcggcgaggcggtaagcgcgcgacttttaacggagatcaatgccgacaaaacgctggcggacaaataccaggaacatgtcacgcttttaataagagaatctcctgagaggtaccggcttctctttcctgagcccccgcaggaactccgggctcctcacttgcggatgaccgtcgatacagaagaggactacaggctggcccgcgagctgtacgtaaaagcgggctcgcgtcctgatattccggcaaaagaattgatctatctgctgaatagtgatccggagctcagggccattaatcaaatgatccggcaaaaagaggctgattagcatgcgggttctgattttcgctgacgggggccgtgacatcggcatggggcacgcggtccggatgaagctgcttgccggtgccattaagaacaattgctcaataacgttctgcacaaataaagaggcttcttcttatctgtcatctgatcaatgggaagtgatcatcaagcctgacaagggacagaaggaatttattgtccgggaaataaacaggcaggctcctgaccttctcatattcgatctgctcgatatgccgtgtgactggttagaggaagtcaaaaagcattcatcggcacgcatcgtcttatttgaagaaaaacgggaacatgtcattcatttatgcgatgccgttataaacggcatttacggcgggctgaaaagccggacggtccaaatgggcagcgccgctgtatatgaaggcccggaatatatgattcttcatccgggttttgaaaaagcaaagcagctctatcaactgagaaaagaatgccggaccatattggtctcattaggaggaagcgacccgaagaagcttgtctttaaagtgatggaagcatgccgccgcatccccgacattcagcgaaaacgagtgatcatcgtcatgggcggcgccgcgcctcatgctgataacgtgcgcgcgcatcttacacaaatgccttatgccgagatggtaaggcagacaaatgacatggccgcgcttctttcgagggctgatatggccgtcgtgtccggcgggatcactttatatgaaaccatttgtacaggtgtgccctgcatcgtactttctcaagtggagcatcaaactgagacggcagaaaaattcgccgcacggggggccgccgttcatctcggccttggtgaatgcatatcaccggacgttctcgctcggcatatgtctgacatggccgctgattatccgatgcggaccggacttcatcaaaacggaaagccgctggttgacggcaggggcatcaaacgggcggcggcgattctttatgatttgtgataaaaccacacgtaaggaagtgttcatgtgaaaggtgttatcttagccggaggcaccggctcacgccttatgccgctgacaaaagcggtcaataagcatttactccctgtcggtccatatccgatgatttactggtcgatcatgaagctggaagaagcggggattacagatattttgctgattacgcaaaaagaatatattccgcaatttcataaacttctcgaaaccggagaagagctcggcgtctcaatcacatatcaggttcagccagccgcatccggcatttccgacggtttatcatacgcaaagcgatttacaggtcgcgatccgttcgttctgcttttgggagataatatttttgaagattcattaaaaccttatacggagcgtttcgcaaagcagggaaaaggagcgaaagtgctgctgaaagaagtggacgacccggagcgcttcggcatcgccgagattgatgaggaaaacaaacggatcaagtcgatcattgaaaagccggagcagccgccgaccagactatgcgtcacagggatctacatgtacgacgcagaagtgttttcctatattgaacaaatttccccttcaaaacgcggcgaactggaaattacggatgtcaataatttatacattgaacacagtgagctgacgtatgatgtgttaacgggctggtgggtggatgcgggcacgcatgaatcgctctacctcgccggaagcctggcgcatcaggcattacagaaaggacaggagcattaatcatgccaaaatcatatttaattacagggggcgccggatttatcggccttacctttacaaagatgatgctgaaagaaacggacgcgcagattaccgtcctggataatctcacgtatgcaagcaggccgcttgaaatagaagccttaaaaaagaacggccgtttccgttttatcaaaggtgacatttctgaaaaagaggacattgacaaagtcttttcccaaatgtatgacgctgtcattcattttgcggctgaatcccatgtggacagaagcataaatcaggcagagccgtttatcacaacaaatgtgatgggcacataccgactggcggacgcggtgttacagggaaaagccggcaggctgattcacatttccacagatgaggtgtacggagatttggcgccggatgatcccgcttttacggagacgacgccgctttctccgaacaatccgtattccgccagcaaggcaagctcagacctgctcgtcatgtcttacgtgagaacccataagcttcctgccatcattacaagatgcagcaacaattacgggccgtaccagcatcacgagaaaatgattccgaccattatcaggcatgccgtaaacggcacgccggttccgctgtacggcgacgggatgcagatcagagactggctgttcgccgaagatcattgccgcgccattaagctcgtgctggaaaaaggaacactcggtgacatttacaatatcggcggaggaaatgaacggacgaataaagagcttgcgtcatttatcatgaaggagctcggtgtcgaggaacggtttgctcatgtcgaagacagaaaagggcatgaccgccgttacgccatcaatgcttcaaagctgaaaaatgagctgggatggcggcaggacgtcacatttgaagaaggaatgagaagaaccattcgctggtatacaaacagccaagactaatcggaaagaaggggatccgattgacgaaggtattagtaaccggagcggccggccagctggggcgggagttatgccgccagctgaagcgggaagggtatgaagtgatcgccttgacaaaagcgatgatgaacatatccgaccagcgttcggtgcggcactcgttcagccattacaagccggatatcgtcgtcaatacggcggcatacacctccgttgacaaatgtgaaacggagctcgacaaagcgtatttaataaacggaatcggcgcttattatgccgcgcttgaggctgaaaacaccggcgcgaaattcattcacatcagcaccgattacgtcttcagcggcaaaggaacacggccataccagaccgatgatcccgcagatccgggcacgatttacggaaaaagcaaaaaactcggcgaagaactgatccggttaacgggaaaaaaccacaccattatcagaacgtcgtgggtgtacggcagcggcgggcacaactttgtcaatacgatgctgaaacttgcggatacacatgatcaggtgcgtgtcgttaacgatcaagtcggagcgccgacgtacacaaaggatttagccgaaacggtgatcggtctgtttgacaggccgccgggcttataccacgccgcaaacagcggagtgtgcagctggtatgaatttgccaaggctatttttgaagaaagcggcagaaccgcctccgtgctgcccgtcacgacggaggaatacggaaatgagacgccgcgccccgcttactcggtgttgagtcttgagtcgattgaacggcaggggctcggcatgaggcattggcgggaagcgctgcatgattatttacaaagggagggacagtgcaagtgatcgaaggcgtaaaaatcaaaaagctgatcaaacacagcgatgaccggggttttttctcagaactcgtccgtgacgatgaacatctcttagagcgtttcgggcaggcttcctggtccaaaagctaccccggcgtcattaaagcatttcactatcatgagaaacaggatgacctgtggttttttccgacgggccacgcccaggtcgtgctgcatgaccttcgcgaagagtcggcaaccaagggagaaacggatgtctactacatgggagaagacaatccgatgctccttctcattcctaggggcgtcgcacacgggtacagagtgctgggtgaaaccccgctgaccattatttatttcacgacaatgtcctacaatccggatcagcctgacgaaaaaagaattccgtggaatgatgacaccatcggatttgactggcagacggctcaccgatagcgcacaagacgaagacagcggatgtcttcgttttttgtgctgattcatctcgtgaaaaataaatgattgaatattctaaaaaataatttacttccatggataaaggtggtagattattctcaggaaaagagaaacccaattcgcgaatggaaccatcagacacgcttttccggcagaggacgctctgaatcccatatgatctggaggaattcatgatgttaaaaagaaaatcattttcggcctttctcatcagtgctgcggtattttcatctgtgttcttgccatcttttcatgcgaacgcccaatctgccgttattgaagcgaaaaccgtcaatagtacgaaagaatacgcgacgtctgatattgaagtcacatacaagccgaatgcgctgcttgccgtcggcgccgttgaatttcaatttcctgacgggttcaacgccactgtgagggactctgtaaacggaagaacactgaaagaaacgcaaattctcaactacggaaaaacggtcagacttccgcttacccttgacttattgggcgcgtctgaatacaatctcgtcctagtgcgtaaaaaccttccgcgcgcgggcgcgtatacaattaaaggcgattacgtaaacggtttgggggccggcagtctttatgccgaaacaaagctggttattgacccgcgttaatcggggatgaaagaggctgacaacagcctctttttttttatgcgcaaaaaacctggcatgaatcttgcatataaaaagggcgtaacgacaatgtgaaagggtttgatgggttttggtgtaaaagcgcttacattttgttctgccggtaattgaagcttacacgtaaaatacgatgaggtgataaacatgtcagccaacccgctttctaaaagcaatcagaaagatgaagaaaaagaagttcttaatttgttcttgtcaacacaatcgatcataaaagaggccctgcgcaaactgggctatcctgacaatatgtatgaactgatgaaagagccgatgcggcttttaaccgtccgcatccctgtcaaaatggacaatggctcagtacaggttttcacgggctaccgctcacagcataatgacgcagtcggcccgacaaaagggggcgtgcggtttcatccggaagtcagtgaagaagaggttaaggcgctttccatctggatgactttaaaatgcggcatcacaaatcttccttacgggggcggaaaaggcggcatcatctgtgatcctcggacgatgtcattcggagagctggaacggctgagccgcggatatgtgcgtgcgatcagccagatcgtcggtccgacaaaggatattccggctcccgacgtatataccaactcgcagattatggcatggatgatggacgaatacagccgcctgagagaatttgattcaccgggattcattacgggcaaaccgattgttctcggcggttcacaggggcgggaaacggcgaccgcgcaaggcgtcacgatttgtattgaggaagccgttaagaaaaaagggattccattggaaaatgcgcggatcatcattcaggggttcggaaatgcggggagctttctcgctaaatttatgcatgacgccggcgccaaggtgatcggcatctcagacgcccacggcgctttgtatgaccctgacggccttgacattgattacctgctggataagcgggacagctttggcacggtgacgaatctcttctcggatgtcataacgaacagggagctgctggaaaaggactgtgatattctcgtgcccgctgcaatctccaatcagattacggctgaaaacgcccatcacattaaagcttcaatcattgtggaggcggcaaacggcccgacaacgatagatgccacgaaaattctgaatgaaagaggcgtgcttctcgtgccggatattttggcaagcgccggcggcgtgacggtgtcttattttgaatgggtgcaaaataatcaaggcttttactggtctgaggaggaagtcgccggaaaactgcgcagcgtcatggtgaattcgtttgaatccatttatcagacagcgcatacccacaaagtcgatatgcgtttggccgcctatatgacgggcatcagaaaatcggctgaagcggcccggttccgcggctgggtataagtgttatccgcaaagagattttgcatcagttatatagcggatcgcaaaatttctttgcgttttcagattgcagctgacagattcggacaagcttcgtccgctttcggcaaagattttcttatttttatcacaaattgctatgctggtatgcttcttgcatcatcataaagcgtgagcacacattacaaaatacggggaggaattctaatgacagtttcatacgcacacgaaccatttacaaattttcaggaagagacaaataaacaatcgtttcaggaagcgctggcttatgtgaattcacagctcggcaagcattatccgcttatcatcaacggtgaagcgattgaaacggataaaaagatcatttccgtcaatccggcagataaaaaagaagtgatcggttctgtatcggccgccggaaaagaacttgcggaaaaggccatgcaggctgcgctgcaggcatttcaaacatggaaaaaagtacggccggaacaccgcgcgaatgtgctgtttaaagcggcggcgatcatccgcagaagaaagcacgaattctccgcgtatctagtgaaagaagccggaaaaccgtggaaggaagcggatgcggatacggcggaagcgatcgactttttagagtattacgcccgtcagatgctgaaactgaaagacggttcccctgtaaagagccgtgacggagaatataatcagtatcactatgagccgcttggggtggggatcgtcatctctccattcaacttcccgcttgcgattatggcgggaacggcggcggcagccatcgtaacaggcaacacgatactgctgaaaccggcggatgcggcgcctgtcgtggcggcgaaattcgttgaagtgatgaaagaagcgggcctgccggacggcgtgctccaattcataccgggcgacggaggagaaatcggcgactatctggttgagcatccgaagacgagatttgtgtcgtttacaggttcccgcgcggtcggatgccgtatttatgaacgcgccgcaaaagtacagccgggccaaaagtggctgaaacgggtcattgccgaaatgggagggaaagatacggtgcttgtagacagagatgctgatcttgatcttgccgcttcctcaatcgtgtattccgccttcggattctcaggccaaaaatgttcagccggttcccgtgcggtcatccatcaggacgtctatgatgaagttgttgaaaaagccgtcgctttaacaaaatcactcaccgtcggaagtccggaagattttgatacatacatggggccagtcatccacgaagcatcttataataaagtcatgagttatatcgaaatcggcaaaacagaaggaaaactcctgacgggaggcgaaggtgatgattcaaaaggatactttattcagccgaccatttttgcggatgttgatgaaaacgcccgcctgatgcaggaggaaattttcgggccggtcgtcgcgatctcaaaagcccgtgatttcgaccatatgcttgagattgccaataataccgattacggactgacgggcgctctgttatcgaaaacccgcgcgcacattgaacgcgcccgcgaagattttcacgtcgggaatctatacttcaaccgcggatgtacgggagcgattgtcggataccagccgttcggcggtttcaatatgtcaggaaccgattcaaaagccggaggacctgactatctgattcttcatatgcaggcaaaaacaacgtctgaagcctattaatctttcggaaatagcgcgatgaaaaagagagtcgcgctattttctctatatgagggtaaggaggatggaatatgtatcagcagctcagcaaaatgcttccggaggagaaaatagaagccattacaaaatcactggtggcgttaaacagcatcaacggcacattgggagaaggaaaaaaagccgactatatcaaagatatgatcaagagctttccctactttcaggagaatccgtcacatgtgtgggagcaggcgattcctgaggacccttacggccgcaaaaatattttcgcatttattgagggtaacggcgaaagcctgaatacggtcatttatcacgctcatcttgatacggtcggcatcgaggatttcggccctttaaaagatatcgcttttgattccggccgtctcgcggagtatttctcaaactatgaatttgatcgggatgtgcagcgggacgcccgctcaggcgagtggatgttcggaaggggttcggttgatatgcagagcggtattgccgttcatctcgccaatctgcttcacttttctgaacggcgtgatcagctgccgggccatattctgttcatggcaaacccggatgaagaaagccagcattccggcattttaaccagcatttctgaattaaaacggctgaaacaagaaaagcagcttcgttatttagcagcgattaataacgattttatcaccccgctgtatgagggtgacacgacaaggtacatctacacgggcgcggcagggaagcttttgccttgctttgcgatttacgggcgggaggtgcatgtcggtgatacgctgtccggcatcgatccgaatttgatcgcgtcagaaatcaccagaagaattcacaacaatattcatatggcggaaaacattgaaggggagcttgtgcttccgccgacctgtctctaccagcgagacaacaaggaagcgtataacgtgcagaccgccgtcagcagctatgtctattttaattattttatatacgagaaaaccgccaaagaagtcatggatcagctgaccgccgtggctgacgaagcctgcaaagagacagaacgaaaattatctgattattacgacgaatactgtgagagaacgagcttgccgaaaaaagagatgtcatggaacgttcaagtgtacagtctggaagattacctgaaaaggctgagaagccgcgggatagaccctgcacagtgtatcgggcaggcatttaaaacatatgaacatcttgaactgcggatgagatgctttaaagccgtcgaggaactgcaaaaactcgatcctgagcagggagccaaggtcattattttctatgcgccgccttaccttccgcacaattatctgaaagaagagagcacacgggaccggcttttgcagcatgtcattcaagaagcggtcgataaaacagcggcgtcaaccggagaaacattcgcctttaaaaagtttttcccttatttagcggacggaagctttttatcgctgcatgaaacagacgaggaggtctccgcctttaccgataattttccgggctgggatgtcatcgggacgattccttttaaagaaatcagggaattgaatattccgtcggtcaatataggggtatacggaaaggacggccataaatggacggaacgcgtgtacaagccgtacacattccatgtgctgccggaactcattcagcagacgacaatgcaccttttgcacagctaccgattagacatacgcacaaatggctgacataacggaataagggggatgtatatgcagggagataccaatcaaactgaattgcagcgcacgatgaagggccggcatttgtttatgatcgccctcggcggcgtgatcgggacggggctttttctgggctccggttttacgatcagtgaagcgggaccgatcggcgcgatattggcttatgtgatcggcggatttttaatgtatctggtgatgctttgtttgggggagctcgcggtcgccatgccggtcgcaggatcatttcaggcgtatgcggcaaagtttctcgggccgtcgacgggatttacgatcggatggatgtacgcattcagctgggccaatacagtggggcttgaactgacgtcggcggggattttaatgcagcggtggtttccgggcgttccgatttgggtgtggtgccttgtattcggcgtcgtcattttttccattaacgcgctgtctgcgcggagttttgcggaaatggaattttggttttccagcattaaggtcatggccattgtattgtttattattctcggctgcgctgcggtattcggctttgtcggttttaacggcgggcagacggctccgtatctgtcaaactttacgacggacaaagggcttttcccgaacggtgcccaagccgtgctgtttacccttgtcatggtgaatttttcattccagggcaccgagctggtcggaatcgcctcgggagaaagcgaaaatccggaaaagacgcttccccgctcaatccgaaacgtcatatggcggacgctgtttttcttcgtgctggcgatgtttgttctcgtgtccattttgccgtaccaaacggcaggcgtcatcgaaagcccgtttgtggctgtgctggataaaatcggcgttccctatgcggctgatatcatgaactttgtcatcctgaccgccatgctgtcggtggcgaattccgggctgtacgcttcgtccagaatgatgtggtccctatcaaaaactaagatgggtcccgcttccttaacgaaactgacgaaaaaaggcgtgcctctgaaagctctttccatcaccatcgctatctccggtttatccctgctgacaagtgtattcgcggctgaaacggtgtatgtgtggctcatttccatctccggtatgattaccgtcgtcgcgtggatgtcaatctgcgcttcacaattcgttttccggagacgctttctcgctgaaggaggaaatctgaaagacctggcatttaaaacgcctctttatccgatcgtgccgattctcggattttcggtttacggtcttatcttaatcagtctcatctttatccccgaccagcgtatcggtctgtactgcggcgtcccgctgatgatcatctgttacgcgtattatcacttcggtattaaaaaacgcctgaatcgtgagccggcttcttcgaaaaaaggcgctgccggataagaaaaaaagccctccgcaaaaagcggcgggctttactttgtttttcgtttggccgacagcacataggatagaacggcaaagaactcaaaaccgaaaatgctgacggccatcggccaggcattttcttctccggcaatcccgacaaggggagcggcagccgcaccgccgataaagggcaggagtccgagaagagccgcagcgcttcccgcgcctttctcctgtttctgcatagccagagaaaaccctgtcgtcgtgacgatcccgacagaagaaacaatgatgaataaagaaatgcagaccgccgtcaggcctaaaccaaacgcaagtgataaaagcaaagcgatgcttccgatgacggcgatcaaaagcccggagacaaacagcttccgttcatcatgtgttttggccatccgtccggtgatttgggttgcgcatatgattcccgcaccgtttacggcgaacagcaggctgaacatttgcgccgatacgccgtagatgttttgcagtacaaacggcgacccggcaatatatgcgaacatgccggtcatcacaaatgcctggctgagcgcaaatcccataaacatccggtcgccaagcaggccgcgaaacgtcatcagcgtctcccggagtccgccgcttgtccgcttttccggcgggagtgattcaggcaacgccgtaagcacggcggcagtaatgatacagccgatcaccgccagcacgacaaatacgattttccagccggcaaactgaaggataaatccccctgtaatcggcgctaaaatcggtgccgccccattgacgagcatcagtaatgagaaaaaagccgtcaattcttttccggaatacatatcgcgtgcggacgcccgtgcgatgacgattccggccgccccggtgaatccttgaataaacctcatgacaattaaaaacgaaacagaagggctgaaggcgcataataaagaagacagcgtataaagcagcaatgacagaatgagcggcttccggcgcccgatcatatcactgagcggcccgacaacgatctgcccgaccgccagccccaaaagacaaaacgtcaggctcagctgcgcaagtgacgctgtcgtatgaagatcggccgccacttcaggcaaagcgggcagatacatatcgagcgaaagcggcccgaatgaagcgagcgtcccgagaatcagtaccatgccgaggcctgcgcgggcggcctttgaatcagcgttattcatttcatgacccccaccttaacaaatgattctatcactatagcataaccggacgacgtattttatatcatttgttgaatacaaactaaatattttatttaaaatctgaatgtaaataagaaaacagaattagttttcatttgaaatgtaaaatgaaacataaggatgctaaactataaaacaacaaaaggtagaaaagttttacggaagaggtgttcaaagagcatgaacagcaaacaaaccgatcacatcgaaacgaaacgccgatttccgatctgtctcgcgcttgctttgacattaggcgtatttgccgcgggttctgaagagctggtgatttctccgctgcttccggatttagcgcgggcattcagctcggatgtcagtgtgctggcgctttccatcagtatttacggagtgatgatttttatcggtgcgccgcttctcgttccgctgggcgataaatattcccgggaactcagcctgatggcggggctgcttatatttacggccggcacggtgatctgcgcgctggcgcacaatctctttttcttctttctgggcagggcgctttccgggcttgcggcgggtgcgtttgtgccgacagcttatgcggtggtcggcgaccgtgtgccttatgcgtaccgcggcaaggtgatgggtctgatcgtgtcaagctggtcgctcgctttgattttcggcgttccgatcggctcttttatcggcggcgttttaaattggcggtggacgttttggattttcgccctcatgtctgtcctcgttgcttcgctcattttcattgaggcgcgccgcagcacggcggatggggataaaacagaagaggaaaacggccggcaggcaggcactttccgggatgcgctgaaggtgccccgtgtccctgtatacctcacgatcactttttgcaacatgatcggtttttacggcatgtattcctttctcggcacatatcttcaccgcgtgctgccgggggggaatacagcttcagggctgctgatcatggtgtacggaatcggtttttccatgagcgtgttcaccggaaaaatcgcagataaggcggggaaaatgcgctctttgatcgcggcattggccgtgatcagcatatggctttcctgtctcgcctatgcgccgtcatcaatgccgtttttggttatcgggttattcgtctggggattgatgcaaagcctgacggtgaccttgctcagcaccattttaagtgattgctcacagagccgccggggcaaaatcatggcattttacagtctggcgtccaatttggccgtcaccttgggttctgctgtcatgggtccggtctatgtcggatacggatatgcggctgttggatttatctgtgcggccgtcaccctcatcggctttgtcctcagcgttttcgcatacagaaggtatgggaaatatgagcatcaggccgaccaatcattgtatcggtaaaataaagtttctataattttgtaaatgttaatttttagcaccctatttcatagggtgttttctaatatataggaataattatcaatattttcaaataatattgacagcttgaacgtctatggataatatttacttaaaatttaacagattggttggtgctcatgattatattggataatagcattcaaacgaaaagcaaggcttattcaatatctaaactgattacgatcaacacgctcggtcctgaagggacaagcagtgagtacgcagcaaaaaacttcatcaccaattttacccttctccaaggggtgaacagtaaattatcactgcatgatacatttgaatcgtgcattgaaaaaacgcttcaaagtccgctggaatacacaattgtgcctcacgcgtatgacggcattaagcacttctacatgagaccggatctgcagcttctgcaaattttcaggtgcgacaccccgatgtacggcctggctgtccggcccggttttgaatatacggatgacatgcttgatcagactgtcatcgtatcccacccgtctcctatcaatttgattaagtattttacccgtaaagatgtcacgtttgatctggtgaactcaacgagcgcagccgcgaaaagagtgaaggacggtttgtccgacatcgcgctgacaaatgagctggccagacaaaagtacggccttcactttgtcaaaacatttaaaagcattcccatgagctggtcattattcggaaaaggagagattcatgatgaaaactgaacaagatttgcaggaactttatttcccgacgcctaaattaatagaatgggataacggagtaagacaatattcgtccgtcagaggagatacggaagttctgctttcttacgttccgccgcatacaaacgtggaaccgcatcagcataaggaagtccaaatcggccttgtcgtttccggcgagctgtccatgactgtcggagatgtcacaagaaagatgacagcgctggaatcagcctatatcgcgcctcctaatgtgcctcacggcgcaagaaatgagacggatcaagaagtgatcgccattgatattaaacgcctgaaagccggtgaaacctacacaagccctgaagattattttttgaatatttttaaaacgagagacttattgcccggtatggaagtcacgttcttcgtggaagactgggtggaaatcatgcttgccaacattccgggcaacgggggagaaatgccgttccataaacaccgcaatgaacagatcggcatctgcatcggcggcggctatgatatgaccattgaaggctgcaaagtggatatgacattcggcacagcttatttctgcgatccgagagaagatcacggcgccatcaacagatttgaaaaagattcaaaatcagtcaatatctttttccctccgcgctataacagagcaaaagcgaaaaaattagaggcggaagagtcatgaacctgacggataaaaccgtcctcatcacagggggcgcatcaggcatcggttatgccgcggttcaggcgtttctgaatcagcaggcgaatgtggtcgtcgcggatattgatgaggcgcagggagaagcgatgatcaggaaagaaaacaatgacaggctgcattttgtgcagacggatattacagatgagccggcatgtcaaaacgccatccagtcagcggcggacaagttcggcggattggacgtgttaatcaataacgccggcatcgaaattgtcgccccgattcatgagatggagctgagcgattggaacaaggtgctcaacgtcaatctgacgggcatgtttcttatgagcaagcacgcgctcaagtatatgctcaaaagcggcaagggcaatatcattaacacgtgctccgtcggaggagtcgttgcatggcccgacattcccgcatataacgcctctaaaggcggcgtattgcagctgacgcgttcgatggctgtcgattacgccaaacacaacatccgcgtcaattgcgtgtgcccgggaatcattgacacacctttgaatgaaaagtcgttccttgaaaacaacgaaggcacgcttgaagaaatcaaaaaagaaaaagcgaaagtcaatccgctgctgagactcggcaagcctgaagaaatagcgaacgtcatgctgtttctcgcgtcggatttatcaagctatatgaccggaagcgcgatcaccgcagacggtggatacaccgcacaatagagaaggagtgtttacatatggagagaaaaacagtattggttatcgctgaccttgggggatgcccgccgcatatgttttacaaaagcgcagccgaaaaatacaacctcgtcagctttattccaaggccttttgcaattacagcctctcatgcggcattaattgaaaaatactcggtcgcggtcataaaagataaagactattttaagagtctggctgattttgagcatcccgattcgatttactgggctcatgaagatcatgacaaacctgaggaagaagtagtcgaagaaatcgtcaaggtggccggcatgttcgcggttgacgccattacgaccaacaatgaactgtttatcgctccgatggcaaaagcgtgtgaacgtctcggcctgcggggagcgggcgtacaggccgctgaaaatgccagagataaaaacaaaatgagagccgctttcaaccgggccggcgtcaagtctatcaaaaacaaacgggtgacgacgctggaagatttccgcgccgcgcttcaggaaatcggaacgccgctcattctaaagcctacatatctggcgagctccatcggcgtgacgctcatcaaagagagggaaacggcagaagccgaatttaacagagtcaatgaatacctgaagtcgattaacgtaccgaaagcggtcacgtttgaagcgccgtttatcgcggaagaatttttgcagggcgagtatgacgactggtacgaaacaagcggttattccgactatatcagcatagaaggcatcatggccgacggagaatacttccctgtcgcaattcatgataaaacaccgcaaatcggattcacggagacatcgcatattacgccgtccatcctggatgatgacgcgaagcggaaaatcgtcgaagcagccaaaaaggcgaatgaaggactcggcctcgaaaactgcgcaacacatacagagattaaattaatgaaaaaccgggaagccggactgattgaatcagcggcacgatttgcgggctggaacatgattccgaatattaaaaaggtcttcggcgtcgatatggcgcagctgttattggatgttctctgtttcggaaaagaagccgatctgccgaaaggattattggagcaggagccatgctatgtcgccgactgccacttgtatcctcagcatttcaaagaaaacggccagctgcctgagacggctgtcgatttcgtcattgaaagcattgacattcccggcggcgtcttaaagggagacaccgaaatcgtttctttctcggcggccgaggcgggtacatccgtggatctgcggctgttcgaagcgttcaacagcattgcggcgttcgagctgaaaggaagcaattcgggtgacgtggccgaatcaatcaaacaaattcagcagcaggcgaagctgactgcaaagtatgcgttaccggtatgaaacagctgaaaccgaactctaagtatttgcttttcgggcaggcgctttcgtttatgggagactattgcgttctcccggctctgctcattttgtctacatactatcacgactactgggtgacgtccggcgtcatcgcggtccgcagtattccgatggtgtttcagccgtttttaggcgtgctcgtggaccggctcgacagggtgaaaatcatgctgtggacggatgtgatcagaggcgtcatctttttggggctgacatttctcccgaaaggcgaatatccgctgctttttctggcgctgctgtttgtttcttacggaagcggcgtgttttttaacccggcacgtctcgcggtcatgtcgtctttagaagcggatattaaaaatatcaacactttgtttgcaaaagccacgacgatttcgattattgtcggcgctgcagccggcggactttttctgttaggcggttctgtggagcttgccgtcgcgtttaacggggtgacctatcttgtctccgcgtttttcatcagccgcattaagcttcaatacgtgccgattcagtcagaaaacgtaagggaagcttttcagtcgtttaaagaaggcctgaaggaaatcaaaacaaatgcttttgtgttaaacgccatgttcacgatgattacgatggcgcttttgtggggtgtcgtctacagctatttcccgattgtcagccgctttttaggcgacggggaaatcggcaatttcatcctgacgttctgcatcggcttcggcggctttatcggcgccgctcttgtcagcaaatggggctttaacaacaataaagggctgatgtattttacagtgttatcgatcgtctcgcttgcgctgtttttgtttaccccgattttcgccgtgtcagtcattgccgctattcttttctttatcgcaatggaatacggtgaagtgctggcgaaggtcaaagttcaggagaacgcggcgaaccagattcagggccggatcttttcggtggcggaggcgtccatcggattgtgcatcgctgtcggttccatgctgatcaatattgtagacgcggcagtcatcatggcgtttatcgtccttttggtcagcgggctgtttctgcatacaaaactggtcaataaatccttttcagaacggaataacgaatcagagcaaattcatttataaggagcctttcagatggaaatcataccgtccgacgtcatcaagacacttccgaaacaggaattttcgctcgtttttcaaaaggtaaaagagatggagaaaacgggagctcagatcattaacctcgggcaggggaatcccgatctccccacaccgccgcatatcgttgaaacattgcgggaggctgcgctgaatccttcgtatcacggatacggcccgttcagaggctatccgtttctgaaagaagccatcgcggaattttatgagagagagtacggggtatcggtcaatccggagacagaagtcgcgctgttcggcggagggaaagctggtttgtacgttttgacgcaatgcctgctgaatcccggcgatatcgccttagtcccgaaccccggctaccctgagtatttatcgggaattacaatggccagagcggagctgcatgagatgccgcttcatccggaaaacggctatttgccggattttgagcggattgatcccgccgtcctgaaaaaagccaagctgatgtttttgaattacccgaataacccgactggcgcgactgcggatcaggcgttttatgaaaaagcggcagcgtttgcaaaaaaacatgacatccaccttattcacgattttgcatacggcgcgttcgaatttgatcagaacccggccagctttcttcaggcgaaagaagcgaaaacggtcggcgcggagctttattcattttcgaaaaccttcaatatggcaggctggagaatggcatttgccgtggggaatgagaaaatcattcaggcggtcaatgagtttcaggatcacgtcttcgtcggcatgttcggcggtcttcagcaggcggcagcggcggcgctgtcaggaagtcctgagcatacggagcgtctgaagcgcacatataaagaacggattgactttttcacggcgttatgtgaaaaggaattaggctggagcattgaaaaaccgaaagggactttttatgtatgggctgaaattccgaatgaattcgagtcttcacaccagttttcggactatctgctggagcatgcccatgttgtcgtgacgcccggcgagattttcggcagcggcggaaagcgttatgtcagaatatcaatggtggcaaaacagggtgatttaagggaattcgtgctgcggattcaaaagctcggtttgtcctttccttcattacaagaaacatcccgctgagagcgggatgtttttattatatgcttttcatgctgccgccgtcggctgacacttgctgtccggtaatataggaggcttcttcagaggcaagaaaggcagccagcgccgcggtttcttccggagttccgacacgcttcatcgggacgcctgatgcaatccgttcttccgcttccgctttagaaatgccgttttgcttcatgacattcttcacgaattggtgataacggtctgtggcgataaacccgggattcagacagttgacagtaatgtgaaaaggcgcaagctgaatggcgatgtttttgctggcattaattaaagcggcgttcatcatgctgttggtaaacatattggcgccgggttctttccataggtttccgacgatattaatgattctgccgaattcgtgctgtttcatgattgctgcggccgttttcatagagtcgatataagcgattgttttattcgtaaaggtatttgtcatatcctctatatcgcagttttcaaaggtatccggcgagccgcccggaatgttgttgatcaatacatcaagccgtccgcattgtgatctgatctcttcaaaaatgccggctcttgtcttctgatccgacatatccccggccagaacggtgacgcccgcatccggatgtttggcgaggatctcttcttttaccgattcgatattttcgggaactcgagaattaatgacggtatgaaagccattgtccgccagtttcagagcgatcgctttgccgatcccctgactggctcccataataaacgcggttcgttttgacaactgtctgcacccctttaccaaaatggaatctcctttacatcgtaaaaaaaaatgataaaaatagcaaattttatttaaattctgacaaaggaaaaacccgccggacaggcgggtggttgttacacgtgcaaaaacttcggaagcgtgtcaagagacaagcggtttccgacaaaaaatgaaccgaattcgccgtagcgcgcgctgacttcatcaaagcgcatttcgtaaacaagttttttgaactgaagcacatcatcgctgaagagcgtgacgccccattcgtaatcgtcaaaaccgacagatcccgtgataatctgtttgactttgccggcatagctccgtccgatcaagccgtggcttctcatcaggtttctgcgttcatccatagaaagcatgtaccagttgtcattgccgcttcttcttttatccatcggatagaagcagacgtatttcgcttcgggcagctcaggatacaggcgggcgcggacatgcggattttcatacggatcgccttctccgcttgcgaggtagttgctcagctcaaccacggacacgtaagaataagccgggattgtaaattcagcaagctttgatttgttaaattcaagctcgatttcgttcagctcttccattgtcgggcgaagaatcatcagcataaaatcagctttctgtccgacgatgctgtagatggtttgcgagcctttgccttctttttgggcgacaccccatttttcaagcagtcccgtaaattcgtgaataatcgacaggcgctcatcgctggataacatcttccatgacgtccagtccattgtgcggaaatcgtgaagcgcgtaccagccgtcaagcgtttgggcggcttcgttcgttttttgctgctcactcatgtatcttcactcctatatcttttcattacattgatgccttcactatatcacagtttaaccgtttcggctgtggagaaaccttgaataatccgaagccttgtgtcagaaactatgccgtgaacaaacggtcaattaaattagttagaaaaataagatttctttttgaaagcgctataatagaagttggttatttgaatttagctggaagaagagtatgctgtaaaagtaagcgttttttgtcaacatagaggagggtatatcgtggcagatttatttacaaaagtacaagaaaaagtcgcaggaaaagatgtgaaaatcgtatttcctgaagggttggacgaacgtatcctggttgcggtcaacaacttggcgggcaacaaggtattaaagccgatcgtagtcggcaataaagaagacattcaagcaaaagcgaaagaattaaatcttacgcttgacggcgtggacatttttgacccgcatacatatgaaggcatggaagaactcgttcaggctttcgtagaacgccgcaaaggcaaagcgacggaagaacaggcccgcaaagctttgctggacgaaaactatttcggcacgatgcttgtgtacaaaggtctcgcagacggacttgtcagcggagctgcacattctactgctgatacggtgcgccctgcactgcaaatcatcaaaacaaaagaaggcgtgaaaaaaacatcaggcgtcttcatcatggcccgcggtgacgagcagtatgtgttcgctgattgcgcgatcaacattgctcctgacagccaggaccttgccgaaatcgccattgaaagcgccaatacggctcaaatgtttgacattgacccgcgcgttgccatgctcagcttctctacaaaaggatcggcgaaatcagacgagacggacaaagtggctgaagcggtgaaaattgcgaaggaaaaagcgcctgagcttacgcttgacggcgaattccaattcgacgctgcatttgtgccgtctgtcgcggagaaaaaagcgccggactccgacattaaaggagacgcgaatgtatttgtattcccaagccttgaagcaggaaacatcggctacaaaatcgctcagcgcttaggcggctttgaagcggtcggaccgattctgcaaggattgaatatgcctgtaaacgatctttccagaggatgtaatgcggaagacgtctacaatcttgcgttaattacggctgctcaagcgctgtaatccgcaaaagccggcctttacgagggccggcatttttttatagaaagaacgtcactgcggcccagccgaacagggacaaacagagagaaccgatcaagcctgctgcgagcgcccgccagccgttatgacgaaacgccgatatatggactttcaaaccgagacccgccatcgccatgccgattaaaacataagacacttgaacaagaaacgcggaaaacgaggctgaaataacgcctgatgtatggatggcgctcattccgagaaatccgaagataaaccaagggatggggagcgaagcggcagaagccgtctttgactttccgctgcggcgcgcccgcattccgagcatgaatgcggccgggacgagcagcgcgacccgggtcagtttgacgatcaccgccatctcgacggctgcttttcctccggcgctgccggccgccgccgcatgcgccacctcgtgaagcgttgccccgcaaaaggctccgtaagccgcaggagaaaagcccaatccatgataagcaagagaatatacaacagtaaaaacggttcctaataacgaaacggcggccgcgctgatggcggctgcattttcatttgatctgatctgcggcgcgatcgcggcaatggcagccgccccgcagatcgctgtgccgcaggctgtcagcgtgctgagtgtctgatctatacggaacagccgggacagtccgtatacaacggcacccgcaaacatcatacagcagacggcaattgcaaatacgtgccagcccgcatgatagatatccgccagattcagtctcatgccaagcaggatgatgcctgctttcagcaagtatttgcttgagaacgcgatccccggctctaatgccgcccgctgtccgaatacggcgcgccagagcatgccgatcagcattgcaaggacaagcattccgagcatttgcaaaaacggcaggcggctgacatagaaagccgcaaacgcaattcctgcggtaactgaaacaccttttaccatcttcatctcagtcacttcccattatcttgataactccactttactgcggtcttaatcattagtaaaatatatttatatgatctaaacgattaggaaaaataatgattaggggcgatgctttttgtattatggggaactgaaaacattcattgccgtcgtggaagaaaaaaactttacaaaggcggcgcagaagctgatgatttctcagccgagcgtcagccttcacattaaaaacctggagaaagaatttcaaaccgccttgctgaaccgctctccgaagcactttacgactacgccgacgggggacattctctatcagcgcgccaagcagatggtctttttgtacgaacaggcgaaatccgaaatttacgcccatcatcattatgtcaaagggaagctcaaaatcgccgcgagctttaccatcggcgaatatattctgccgccgcttctcgcaaagcttcatgacgagtatcccgagctgaacctggacgtcatgatcggaaacacggaggaggtcagcgaagcggttcggatgcttcaagccgatatcggattaattgaagggcatacggggaaaaacgagctggacattcagccgtttatggaggatgaattgtgcattgccgcaccgaacggacacccgctcgccggcagaaaaaacatcccggctgccgaattgcaaaatcaagcgtgggtgacgagggagaagggttcgggaacgagggaatatttagaccacgtccttcaatcaaacggactgcggccgaaatccatgatgacgatcagcagcaaccagggcgtcaaagaagccgtgatcagcggaatgggtctttccgttctgtcaaaaagcgtgctgcaaaaggatctgcttcacggcagcatttccgtgcttgagataaaaggattctccttaaaacggaaactgtctatcatccaatcttccattatggagaacacaaaaaacaaagaaatcttcatcgctctattgaaaagccaatttcaatcatcacaagcggagtgatataataaatgcatggaaagcctatgacgaaagggatttaaaatagatgggaaagcaaccgattgatttactgatgcagccgagctggagaatcattgaccaatccagcctcggcccttattttgatgcgaagcagtcattcgcaatggatgatacgttgtgcgcctccgtaggcaaaggggaatcgcctgcgacggcacgctcttgggtgcaccaccggacgatcgtgctcggcattcaggacacgcgcctgccgtttttagaggacggcgtgaaattgctggaggacgaaggctatcgtgtcattgtccgcaattccggaggcctcgccgtcgtactggacgaaggcgtattgaatatctcgcttatttttgaagacgagaaaaaaggcatcgacatcgacagaggctacgaggcgatgacagagctggtgcggcggatgctgcgtccgcaccatgccgaaattgaagcatatgaaattaaaggatcgtactgtccgggcagctatgatctcagcatcggcggccgaaaattcgcgggaatctcacaaagacgcctgcggggcggaaccgcggttcagatttacctctgcgccgataaaagcggaagcgaacgcgccgatctgatcagacgtttctatcaagccgctttaaaagacaaaagcaacgatacaaaaggcgtatatcccgatatccggcccgaaacgatggcttcattaagcgaattgctgcaaacggacattaccgtgcaggacttaatgctggcgcttttgactgaactgaaggaactcagcggacgcctgtatgcagccggattatcgccggaagaggaaatggtatttgaaaaaaatctgacccgaatgctggaacggaatgagaaggtgttcggcacgcaggaaagcttggactaagtccgggcttttttttgtttttggtaattatatactatttagttatagtgaaaaaagaagtgttatatgaaaactagtttacattatataccttatttgattaatatatttatgtaggttccaaataattctataaactaaaggagatggagatatgaactttaaaaaaataaaagaagaaaaaagaatcacgatcccgacacatttgttagccggagatgcggaacaatcaggcaattctttcgcttggagcggctgggtgcttgtagtgccgagccaagaagacaatcaaaacccgaatttgaatttctctgatttagccgctcaaaagtaggataatcactgtttggagcctacacatctgagacgaggcggtgagagtgtgacacaagagtatataacagaaattaagcggggggcactgtcatggattgttaaaaatatccattattttgatatgaatcataaagtagcgaatgatttcaggtggcgccttaaaacatttatagaactcatttttcttaccaattacctgatcagaaatcaggcagatgataaggaagttgctgttttaacggagtttattacagaaaggctccataatgatcagcttgaagaatttattcattttgatccggacggtctcgccggattggctatcgcgggtgaatttcttaccttgactgatcatccgtcacgggcttcggtgatatgggagctggaaaaattcacggcagcacgttttgattgcagccttgctaaaattccctttcggaaaatggatctgaagtacagtctgcaaagagcaggcgtaacctcggaaataacggatttttctgacttatatcactacacagcagctggtcaggatatcccaaatacatatatgacggatcatgatgcgtacagtatcactcatacgattttttatataacagacatgggatgttcttcgcttacggataaagagtatcatctgccgtccttaaaagaaaaggtcctgaaatttctcgggatctatatctgtcttgagaatttagatattaccagtgaattattgatgtgcagctcttttttacatatcgacatggataaggacaaccataaaccgctctatgaagcagcctggaataaaatctatcagggccgaatgaaagaggggaatgtcccgagcatcacctatcaacataaacccggtttgaaaggtgaacagcgaagagaagatgtgtttaaacattgctatcatacaacacttgtcgccgcgggtgccgcgcatgcctgtcttagagcagaaaggaacgattaacttgaatagattagctgaagagacagatcaatttttattatcttttgctgaacaatcgcttccggatcaaaagagcattcagctgtttgccggcttctgcaagtactacaggaagacgagccattcttccgctgtaaaagaacatactgaaaggattgcctccgctttcgttgataagtcatgctgggaagatctgtttcactgtaacacggccattgtcaatgagttgattcatatctatttaacggcaaaagcttataaaaagaagcagggaatggattcggatgatcaggtcatacgtcacggattgcaaaacggctatcttataaaaaaagaatggccttattttaaatacgccgaattcgtcggtttgctgagcgagctgggaatgtcaactgaccatgaaaaagtgcgcttttacaagaattcgatgtttcagcctttgctccatgacgcatggaaaagaacagctgaaaacgagctggagtttgtcgagtactgtcttcttcatttagatcagggagagcatctgcttcatcccggcttgaaggcttccattcaaaaatggcttgtgttttgtctcggcagccgaaaaatgaaacagctgtgcaatatgttatttatccaatcgtgtatcgatccatttttttatggctgtcaagcggctcttcatcatataaataacgagaatccatccattcattgtgctccggctcttctgccggcgattgagattctgaatctggagtgtggaacatgcagatagtcaaggaacattttaatataaaaaaaacagaagaatggctgctgggtttttggaagaacattcagctgcagccggaagaaatggaagcagatgatttcatgcacctgttttgcggtttagcggcatgtcatcattttgaaagcagaaaggatacagaagaagttattctattcctagaccgttatttcggagaaaaaacacacgaatgccatccggtcctgttcgcgtatgcgtatcatgtgtaccgcaggatagatgccgcaaaaagcatcttttttcataacggacttgaacaaatggtccgcggtttacaagaggaactgaaatcagagccgtcctctatgatcctcatggtgttaggagcttattttggggcggtgactccggaagaactgatcgtgttcttagaaaccgggatgaaacgtgaggccgatttgctcatggcaccgggcggcatgcaggaagaacaggcggatgccctttatgccgtcacttatttgcaaatgaaagaattgcagccttttctcacggaatggtacaaaacatcagactttgctttttcaggtttaatgttagccgagtgcagaaagtatcacattgacgccgttgcaaaatacacagccattatgaaatttctccaattcgatgaggcgctttttatacgggaagggcgggaatttctacgctttcagcagcgaagcagcgggagcttcggttatttgaatccattagcgatggaccaaggggcggtcagcggcaaattactggaccgtcagtatttcctgccgtccgctcattatgccgccgcctctctgtctatgctgtaatgtctctcttttgaaagacggaaaaagaaatcaataaacatataagaaagtagatcgctataaccgtcatggaataggggatgtttaacgttgaaatcgcatcacccgcacttttatttacataagcaacgagatttaaatgcggaaagagcgtaaatttataccacgtaaattgggcaagcaaatcagttccgcccaatatactgccggcaaacagcagtaaaatggataagcaaagggagagcgcctggcttttgcacaatactgacaaagtgaacgcaatggtgacaatgcttataattgatatgaaacgcaaaagcagaatgattccggatgctttgattgaactgatggtatacagactgtcatttaaatgagtatagacgagcggatatgaagcattggaaaaaccgaataacacgccgccgatcagcaaacagctcacacagtaaaataagtaaaccatgccggtaaacagaagagacgccagaaatttcgatgttaaaatccgccatcttcggttcgggcttgtagcgataaacttaatcgtcccaagggcaaactctttagaaacaaccccgctgacggttaaaatcgcggtcaagctgacgaaaatctcaagcccgtttgaagtaaccgtgccgaaaaacctccagccgttccattcataagggttgatgttatgctccaaataatagtctttattcttaacatcagcagaataataaacgcctgtcgtttcagcgggtttatcaatttcttcctgttttttttcggcgagaagccgttctttccaattgttatccgaggaagcatctaactcatgattcataataaggccggccagcaaaacgatgagaaacaggaaaaaaagagataaaagtgtgccttttttttgggttatttttatgaattcgttctgcgccagatgaaatatgctcataccgcgtcctcctgatctgtaatcatcatgtatttctcttccaatgacaaagttcttgcagaaacgcgggaaatcagaatctctttctctgccaaagatttaatgacatacgggatggtatcttcttccgcttccaattcaatgatgcggctgtctttttgctgtacttgaagaataccgtcctgctctaatatttctttcgcccttgccggatgatcgaccgtgacggtaaacagctttttctgaccaaggtcatgtctgttcttcatgtcttcaattcctaaaatccgtccctttttaatataggcaaccctatcgcaaatctcctccatttccgacaataaatggcttgataataaaatggaaaccccttgcttcgctaaatcggaaagaatggtgcgcaattctttcattcctttaggatcgaggccgttcatcggttcatccagaattaataatccgggattgtgaagaagagaataagcgagccccaagcgctgtttcatacctaatgagaaatgtttcacttttttgcgggcagcctgctctagcccgacttttgcaagggtattcataaggtcatccgttcgcagcgaggtgctgcgcagtttagtaaaatattttaggttttgcaaagcggtcatattcggatacatatccgggccttcaatgataaccccgatatgtctcataaaatattcaaagtcgctgtccggtctgcctctgaatgaaatggctccttctgtttttttaataagctgtacgatcattctgaaaatagtggtttttcctgagccgttcggccctaaaaggccgaaaatctcgccttttctcacatcgaaagaaattgactgtacaataggggtatgattgattgttttagagacatcttttaatatcagggctggttcagtcatgatatttgcacaccttccttatgatttagggtaaaagccgtcaaaaccgaagaacatgcttccgatcaggccggcaacgattaaaatgagagcaatgctataccacatttttcgattcaatggtttccctccttacaacgctgacattccatttgaaatagcgcaaaaagatgcggaatatcagtttcgaaagatcaaatccggccataaacaccgccatacccgctccaagaaccatacatccgttaaaaatggctgttacaatcggcacttttacgaggagaaagaatgatccggtcatcagcatcaggccgatcgccatcaaacttaacaccgcaacagaggcaaaaagaaacggtgtcagcataaacatgaagttgaacatgcccatccccagcatcaggccgaatgctttgaaaaaggagcgccatgttttctgctcctcggcatcactgatgaaaatatccgcttttaaggcgcgcgcaagtgttttggggtttcctaaattgtcggcgatttgttcatcgctttttccttcagcgccgcccatttggaatatttcgccgatatcggcgagtatctctttttgctcaagttccggcagatcttttatttcccgccggagatgttttaaatattggtctttacacattcattttccctccttaatgatgctgttcactttttcggacaggtcaagccattccgattttaatgtttgatgataaaaggcgccttcttctgttaccttgtaatatttgcgtgacgggccttgatcggaagctgctgtatacgtttttaaatagttgttttttgtaagtcttcgtaatatggggtagatggtgccctccgatacagggaacgtttcacttatgatcttgattaattcataaccatataaatcttcataaagaagcagggacaacacacaaagttccaacgctccttttcgtaattggctactcatttactatcattcccatcatatctaataattgtattctctatacagtgtattgcacagtagctaatcgatcaataattcccaagaaccatttgggatgaggaattgaatctttatgcttatgtgcgggcggggaccgagatgcgcagcccttgcgggaagaaggcctcctgaacaatgtttacattaatatagatcaggatgcgcgtcattgacaaatggcaaaaacccctttttccatgacaaggaaaggggtttttccgttattcggccattttttctaaattgccgttccggtccattttgaaggacggagaggcatgttcgtcgtcttcaaataaaactagttttctggctctgttcataattttcaccaaggtttcgtagtcttcctgaatggttttttgatctttttcaagcttttcgacggccgcttccagctgctcggttttagactgaagttcttggttttcccgttttaaacggtcattttccatttgcagggcggaagtttgctttccgttgccttcatagctcttcagaaattgaatgacgtctgccattgtgagctccgccttttggctcggctgctgaggcgccagcaaatgtgataaactagctaactcttccttgaagctttcatcgacataaggcatatgttcgccggacatgacggcttgccgatcctcttttggcgcttccgtttgaaccgtctcttcggctgcggtttcctgcatgatgtccgcatccggcgcaggcggctgatataatagtttcttcttggccggctggccgtttccgagcgcgcgcatccgctgtttccgctgttttttggcgagctgaagcgctttttcgtattgatggcggacgacggcattccatctgaaaccgcacgctgccgacgttctgtttaatttatcgcctacctcttcaaaggcgttcagctgcgtgcttccttcccggacgtgccggagcacggtttccgcaagcagcaggtcattttcctccgaccaggcgtcctgtctttgttttgtcaatgttctcaacccccaatatctttgatggtattagaatgtccagattggaaaatatttatacaaattggctgaaagaatgagagatacgcagagccttgcaggataagatgaatccttgtacaatgagatgtgatgtgatttttttcgtttttaaaattaagttttaacatagaggaacattgaatgaagggaagcgtacatcatggctaatgaattccgagtgtgtgatgattgccaggccaccaatattaagactttgctgccgcgtttgaaagaagctgacccggatgcaaaagtggaggtcggatgtcagtcatattgcgggcccggacgcaaaaaatcgtttgctttcgtaaacaaccgcccgctgtcggcgccgactgaggacgagctgattgagaaagtgaaaaagaagatcaaaaagtaaatgtgtatttttacgacagcctcgcccgatgggtcaggcttttttgcttcaaaaaatcaatgtcggaaaactggaacaaaacgccggacaaattcaaggatgttttcaaattacagagccgatataatagaatcacggctaaaaaaaagagggaatgacgatggcgtatccaaacggaaaattatcagaagaaaaagtgtttaaagatcccgttcaccgctatgttcatgtgcgggacaagctgatctgggatttgatcggcacccgtgaatttcagcggctgcgccggatcaaacagctcggtacgacgtatttgacgtttcacggcgcggaacacagccgttttaaccattctctcggcgtctatgagatagtcagacgaatggttgatgatgtttttaaagggcgtcctgaatgggatgacaatgaacgcgaactctgtctcagcgccgcgcttttgcacgatttgggacatgggccgttttcgcattcctttgaaaaggtttttcatctggatcatgaagactatacgagggaaatcattctcggcgacaccgaggtgaatcaggttctcagaaaggcgggaccgggatttccgcaggatgttgccgaagtcattgccaaaacatacaaaaacaaacaggtggtcagcttgatttcgagccagattgacgccgacaggatggattaccttcagcgggacgcatactatacgggcgtcagctacggacattttgatatggaacggattttaagggtgatgcgtccgcgagaggaccaaatcgtcattaagcaaagcggcatgcacgccgtcgaagactatattatgagccgctatcaaatgtactggcaggtgtattttcatcccgtgacgagaagcgctgaagtcatattgacgaaaattctccaccgtgcaaagcagctccatgaagaagggtatatcttcactcatgctcccgttcatttttattccatttttgaagggaagctgacgcttgcggattatctgaaacttgatgaagccatcattttatattatttccaggcttgggaagaagaagaggacccgattctgtccgacttgtgccgccgcttcattaaccgccagctgtttcaatatgccgaatttaaccccaatgaggaaatgtcggcttattttgaactgaccgctctgtttaaagaggcgggaattgatcccaattactatttagtggtcgattcttcatcggatctgccgtatgatttttaccggccgggtgaagaggaggagcgtctgccgattcacctgttaacgcagaagggccagatcaaagagctgtccaggcagtccgccattgtcgaatccatttcgggcaaacgccggacggaccataagctctactatccgatggacctcatttgcgacgattcagaaaaccctgaagcaaaattaaaaatccggcagctgctgggactgacatagaaggattttggtaaagaaggaaaaggagatgtcgggaatttgttgaaagaacatgcaaaactgatgaaggtgttctcggattctggagaaatcatcgggcggaaaaagctgcagaaaatcatttatatcgcgaagaaaatgcagtatcctttctacgaaaaatatgattttcatttttacggcccgtattccgaagaactgacgcttcgaattgaagagctgtgcaatcttgggtttctggatgaggtgaaggaaaaaaagggcggctactttcaataccggtactcgctgacggagacgggagccgagtttttacatcatgcggagcttacgatgccggatatgaagaagtacatcgacagcgtcaacagccgctcatcccggtttttggagctggtgtctacgattttgtattttgacggccttgaagctgaggaaaagaaagagaaagtgtttacgataaaaagcaaacagaaatatacggatgaagaatatgatgaggcgcttcactacatagaagagctgaaacacatttgttaaaggcgatggctttcgtcttttttgatgaaaaaaccaggccgcacataaagcgggcctggttttgtttattgtctcaatttgctgtgcttgtacgaatataaaaagtaaacgatcacgccgatgatcagccagacggcaaaataaagccacgttttcagcggcagattgaccattaaaaacaaacagcagataatggccaaaatcggcagtacgggtacaaaaggcactttaaatccccgtggcagatccttatgggtgcggcgcagaatcagcacggacagactgaccatggcgaatgtcaataatgcgccgatgtttgagagatctgacagctctttcagatcaacaaaacccgcgatgcaggcgctgatcagtccgatcagccacgtattaaagatcggcgctcccgatttctttccgacaatggtaaagactttcggcagcattccgtctcttgccatcgcaaaagatatacgggtcgccgcataggtatgggcgagaacgacggccatcagtccgatcaccgcaccggcagcgataacgcccgccaccgcgttttgtccgacagactgcagcacataagacatggcttccggcacattaagctgtgaatacggaaccatccccgtcatgacgagacagacgatgacgtataccaatgtacagatcaccagtgaaccgataataccgatcggcaggttgcgctgcggttttttgacttcttcagccgaagcggaaatcgcgtcaaatccgagaaacgcaaaaaagacggcagaagcccccgtaatgacgcctttgattccaaaaggcataaaaggatgccaattgcccggctttacaaaaaagcttcctgtgatgataaacagcaaaacaattccgatttttacgagaaccattatattattaaaggttttgctctctttggagccgcgtgacagaacgacggcaattaatagagtaatgatgatggcaggaaggttgacgatgcccccctggctcggcacgtgcagcagactgtccggcaaaggcatgccgatttcggctaacagattattaaaataacttgaccagccgcttgccaccgccgacgccgtcaccatataaacggataagagcgtccagcccattaaatggccgacaatttctcccatggtggtataagagtaaatataggcgcttccgtaaaccgggagaacagaagcgatttcggcgtaacataatgctgcaaggctgcagacaacggctgcaatgataaaagaaaagattacggaaggtccggcgtttttcgcggccgtaatgcctgtaagaaccatgacgcccgtcccgatgacggcgccgatgcccagtaaagttaaatcaaatccacccatcgttttggcagtctgcctgtttctgctttgttcaagcagctgggtgatgtcttttttttgtaggatattccgcaacacgcatccctccatccaaaagcaaaagccaagaggggctctttggcttttacccgtgtcacatcttctgtgtaatcgacaatcctgtgttctgtttccccgtctgttccgtttcttttccagtcatattgtctgccgcatccgatcagattatcctttccgtcaaacgcagtcacccttaatgattttacctgaatcatgtctataaaaccagcattgcataaaagggatgggtaaaaaagcaggagataatagtctgtatagggcaggataaaagttgcgggctttccggccgaaattttgactttccccgcgaggtatcagtaaaatgtaataaaaaacaatcaaatgatgatggatgcatcttgaaatggggagtttctgcatggagtacgatatattgcaagcaaatgtactggattacgcgctcacgaaatatttaaagagcacgaaaaagcttgatgaggcgacaattccgaagagtataaacaatatcagaggatttattctcaggattatttaccggcacggcacgtgcacgattaaagatatattgcaggaagttacattatcgccttcagccacgacaaccgctctgaatcatttagaaaaagagggtttcgtggaaaggtcgagaaataacgaagaccgacgcacggtatggatgacgctttccgaatcgggaaaaatggcggccatgcaaatgattgaaaaccggcagatgctcattgacgagctgttcgaagcattgacagaagaagaaaagaatacctttttcagcctcgttgaaaaagtaatgaaataagccggcctgacatagcagcgccggccattatcaaggattactccgtatcgctgatccgtttgccggcgacggcgtaatgatcctttctcatttcatcaatcatgacaatgatcttttcttcggctgcgcctgtcgtttcttttacggcttctgtcactttttcaaccagattccgtttttgttcatctgtgcggccttcaagcattttaacggttacgagcggcatggtgctgatcctcctttatcgtttcctctctttggaagagaggtcacttatagtatactgaatgaaggacaatcttgcattttttaaaaaaggggatttttacatttggacagatttttatattatccgctggagcttatgccctatgtcgtgattacgctgatcgtggcatttacgatgcatgaactggcgcacgcgtatgtcgcgtatcggttcggagacgataccgcggcgagacagggcagattaacgctcaatccgattaaacatcttgatgttttcggaacgattctaattttggtcgcgggtttcggctgggcccgtccggtgccggtgaaccgccgcgcctttaaaagaccgcggctggcgggagtgctggtttccgtcgccgggcctgtaagcaacctgcttcttgcctttatcggtttctttttgctagtgttgatgcatgcttacggaatggagctgctttctgcattcagcatggggcttgaccgctttttctctatttggattcagctgaatctcgcgctgtgtttattcaacctgctgccgcttcctccgcttgacggctaccggattattgaggatctcgtgccgccgcgggtgcgcgccaaaatgactcagtttgagagctacgggattatcgtgtttctcgtgctgtttgtgacaccggtcggctcctatgtcgtgtggccgctgttaagtgaggggagagactggattctcaaggtatttgccattatatttcaaccgcttttgtaggagggtattttcatggaagaaaaaaagaagaaaacaatcggatttaatattattaaaagtgatccgaccgacggacatggcggttttggcgccggggcgctgagccttgacaatatttctccggtatttgtcgatgtggaagagaaggaagccttcgttgacatcggcgccatgcatgcccgcagtgtcgttgaaaaaggcatcaaattcctgccgaacaaagatgaagtgccgaacggaaaaccgtactggctcgtgtgggtcaccatcgacagaaaagaagaaggcccttattacgcgggtgtgacggcttgtgaaatgaccgtggacagaagtatccgcagaggctataagtcattgccggagcatgtgaatttaatggataaatcaatgaagcgctgcattatcgtggacaaaatggacgccagctcaaagcaggtgcttgctgaatttctgcagaagcatgaccaagggctctgggaacgttcatccgatgaattgaaaacaggtctgcttccggaagaaaaataatttgtgaactttttgtgaactttataaatatttgcactattttgcgattgtactgagtaaactgttgatacagaatcaggacatggaaagtcccgagccgaaccaagactcggggtttttcatgtttacgcggaggtttcatcatgttcaccgtctttgaaatcgggccatgggtcattgaagcagatgcggcggaaacgagaaaacaatacgaaaaatcatggcctgatccttgcgattgcgggagctgccggaacttttccgaggcggtgaatctccttcccgccgagaaaacaagattgtttacgcagtttgggattcgtccggctgtctgtcacgacttgggggagcatggaaaggaaaacggcctgcatcattatgcgggcagctatccgattgtcggcaggcttagggaaggctggccgaagtttcatatcgagagggcgggagatatccgcttttcgttttcattgccgagtacaacattttttataccgaagggttttcctgaccctattatccatctcgacttttcactcttgctcccatgggtgcttgaggaagacgcggattaaaagcccggcgcgcaatgcaccgggctcagtcttttttgccgagccacttatcccaccactttttgcgcggagcttctttgcgggcgggggcgtgttccttttcttttttagaaggttccgatccgtagcacacatccgcgggctcagtgcctgcgatgaaatacgtataatgctttgcggcgcagccgggtcccgaagtgtagccggaagcgggatcgatatagacgcccgtgacgcccttcggcggtttaagcgctatttccggttctccttcgagcgccttctccataaagtccgcccaaatcgtcttcgcatagcttttttcttctactgaatcaatcgtgctgcttttgtcatagcctgtccatacaccggcggcaagagccgggttaaagccgatcatccagctgtctgcgctggtcgtgcctgatttaccgccataggttcgggtcagccggtcagaaatggtgcgtcccgtgacggaagtatagccgtttaaatcctgatcaaacatgcccgtcatcatgctcgccgtcacaaaagcggcttttttatcaagcgtctgctgatgtccgcgcggctgttcatacaagacgttgccggcggtatccgtcacttttgtgataaaggaaggggtgatttgttttcccccgtttgcgagcatcgcataggcattaaccatctcaatcgggcgcacgggttcagttccgagcgccagagacggaaggggctttaaatgttcgctgatgccgaattcctttgccgccgacacgagcttattcatgccgagaaagagatgagtcttcacggcataaatgttgtctgataacgcaagcgcctgaagcagcgtaatcggtttattggcatagtagccgttgtaattgcttggagaataagtatttccgttgtcgtcaatctggaactctgtggcttcgcttttcatcagcgtgaccggtgtaaagccgctttgaatcgctttgtagtacaaaagcggcttgatcgtggaagccggctgccgtttcgcctgtgtcgcccggtcaaacgggcttttttcgtagtcacgtccgccgagaagcgcaagcacgcgccctgttgccggatcaatcgcggaaaagccgacctgaatgtcagagccggtacggatcgtatgtgccacagtgttttccgcaatccgctgcatgcgcttatcaagcgtcgtataaacacgcaatccgctcgttgcgagctgttcgcgcgtcatgccgagctttttctcgagttctttcatcgcatcatcgtaaaaataaggcgccgttttcgccgcggttctgtttttcagcggctgataggcaagcggcgttttcttaagcctttccgccttttcttttgagatcattttttggccgatcatcagtcggagaatggtttcctggcgctgtttggccttcttttcgctgacatatggcgaatagccggacgggcctttcggtatgcccgccaagagcacggcttccgcatcgttcagatctttggcgtgtttgccaaaatacaggcgcgaggcggcttcaattccatatgcgccgtggccgtaatatatcgtatttacataaccttctaaaatctcgtttttagaatagttctgttcaaggcggatcgtgtaaaaggcttcattccatttacgtttccatgtcttatcatgctcaaggtagagatttctcgcgtattgctgggtgatggtgcttgcgccctgaaccttggccattgcctttatgtcagccagcgcggcggcggccatccgccggtaatcaaaaccgtggtgattgtaaaagttttgatcctccaccgcaatggcggcctgcaccgctatcggattgatatcttttaaccggacccagtagcgcttttccccgaaatcggtctcacctagctttgagccgtcatttgcataaagaatcgtagactgaggaacccggacggagggggccccctgccatttcgctgcaagaagaacggatgtgaagcagacgccggccagcattccgccgatcagtgtcagaaagatgcaggcgcggatgattttgaatgtgattctgagctgttttccagatactttatccacttttgggaaccccctttttcatgattctattattatgtgaaaaaagggggttttttaaacatatcaaaccggacacttctttactttttcccctccatcctctatactttttccttaggtgaaaatgagattttaaccggaataaaagcgatacagacgcttacaataaatgaaataagccttgaaagggagatgacaattgagcgagctttggtatacggagaagcagacgaagaatttcggcattacattaaaggtgaaacaaacattacatacggaacagacggaatttcagcatctggaaatggtggagacagaagaattcggcaacatgctgttcttagacggaatggtcatgacttctgaaaaagatgaattcgtctatcatgaaatggttgcgcacgtcccgttatttacgcacccgaatccggaaaacgtcctcgttgtcggcggcggagacggcggtgtcatcagagagattctgaagcacccaagcgtaaaaaaagcgacgcttgtcgacattgacggcaaggttattgaatactctaaaaaattccttccgtccattgcgggcaagcttgatgatccgcgcgtcgacgtgagagtcgatgacggtttcatgcacatcgcgaaatcagagaatgagtatgacgtcatcatggttgattcaacagaaccggtcggaccggccgtcaatctgttctcaaaaggcttctatgccggaatttccaaggcgttaaaagaagacggcatcttcgtcgcgcagacggacaacccgtggtttacaccggaactgattacaaacgttcagcgtgacgtgaaagaaatcttcccgatcacccgcctgtatacggctaatatcccgacgtacccgagcggcctgtggacatttacgatcggttctaaaaagtacgatccgcttgaagtggaggacagccgtttctttgacatcgacacgaaatattacacgaaagagcttcacaaagcggcatttgttcttccgaaatttgtgagcgacttaatcaaataaaaacgtacggcgcaggagcgaatcttgcgcttttttacaggaaagcgagggttttatcatgaggtttgatgaagcatattcaggaaaagtatttatcgcaagccgccccgactggaaagaggcggacgccatcctttacggcatgccgatggattggacggtcagctaccgtccgggttcacgattcggcccggggagaatccgcgaggtgtctatcggtctcgaagaatacagcccgtatctcgaccgtgacttagctgatttgaatttctttgacgccggcgacattccgcttccgttcggcaatccgcaaagaagccttgatatgattgaagaatacgtggacagcattttagaaaaaggaaagttcccgctcggcatgggaggggagcaccttgtatcatggcctgtcataaaagccatgtataagaaatttccggaccttgccatcattcattttgacgcgcacaccgaccttcgcacggattatgaaggcgaaccgctttcccactctactccgatccgcaaagcggccgagctcatcgggccgcaaaacgtattttcattcggcatccgctccggaatgaaggaagaatttgaatgggcgaaagaaaacggcatgcacatttctaagtttgaagtgcttgagccgctgaaaaaagtgctgccgcagcttgcgggacgccctgtttatgtcacgatcgatatcgacgttcttgatcccgctcatgcgccgggaacgggcacggttgacgcaggaggcatcacgtctaaagaattactcgcgtccatccatgaaatcgcgcgctcagaagtcaacgtaaaaggcgctgacctcgtagaagtcgcgccggtctatgaccactcagaacaaaccgcaaacacggcaagcaagatgattcgtgaaatgctgcttgggtttgtgaaataaaagaaaatcccccgcttgaaacatgcgggggatttttatattgtatataaactacttagaagttagtaaaagcaacatattattttaccattaatcattgatgttattgataaaaattatataatagggtattatttagtaaatacatctttagaaaggaagttagaatgaaaacagcagtagaaaatgaattggaattaaaaaagattgaaatttcagtaattaaactgataattgctgaaaaacctaataaagagatcgctaagtcattaaactactcgcagcgtaatgtcgaatatatcatagccggtctctgtaaaaagtggaatgtgagtactagagtcggtattgtttcggaagcatataaaaggaactgtatacagtgaacgaaatgaaagaaaaacccctattgagggggtttatttatatatgctaaaaaaacattctatacaggaatgccgtaaaaataaaaactgagattgtcaggtagttcaaatttgttctccatttcagaagaataaacaaaagaaataagtatgcaatattgaacaaatcaaagatagaaaaaatcaaatgattacttgtgaaaaataaactagtatttggatgttctgcgaaaatgtttttgaatgatataagaaaaaacttaattgcgaccgggatgttagaaaacataaatagggaataaaaggttttaatcttaatttgagcgccaagaaaatttataatgagaaataatacaaatccttcaaaaatcaccccgaacattaaaagaaacagtgcggctatcgcaatgatataatctaaatgtttcacttgctcaacaacttgtatagggatgtttttgggaattaaacttttcataaaaggcaatagagaacttaaataaaaagctaacccgataatataaaacaaaaacgaggacaaaaaattaatgtttcgttccttaaatgaggataattcaatttgcataatcttaagaggctccttttataaagataggtgtaataaatgtttctaacatagctgctatcattaaaccgagaaatataataccaatatatttaaaagtgaatttcaaatttattttgaggagtaataaatctaaagttaatttcattcctacagaggctgcaagaagcaataccggcacttcaattattccatggggaataacaagcagtaaaaggtttaaattgtctttgatgtttcctatcgcattccctaaaattaatccattaataattaaaacagcaaccgtgccaagtgacagcgtcaacggtcctaaaaaaacaagcagactcgctactttaatattattaaagaaaatctgaaaaaaatccggacggatatttcgatttagattatttacatttgaagcgggatctgtataaaaatatgctgtaaataaagcaattaaaaataagatcagacagagtatgtacaatttgactaaaacgttctttttaaacaaagtattttcatccattcgtttaagggactgccagggatattgaatttaatgttttatattaagctgctgctgtacttgctgcagccaattgttctaaaacggctaatggcaagcctgcaccaagagatcctaaaacagtaatgatagccaggactgaacccgttgcagtgatagcactgacaatccaactaggagctattattccagctctgtttaaaatatcgatgacatccatgcttaaatgattatgttttatactgaaaagagcgagaacaatgattcctgatgctactaatgtaaaaatcgctttactattttgtgtttttaaaagtagactcattttttcctccaattttttcaatatccccagcaagttaaataataaaatatattggaagctatttgaattgcggatttccgaaaaaatatttaagaggtgaaatccgttaaggtatctgctggcttatttcagtacaaagaaagccggaccatatgtatgatccggctttctttgtactgaaacatttatatttttttttcaagaataatatcaaaataatcggctgccccataacctgaaataggaggagcaaatatttgaaccagcttccatccttgctgcgaatacttttcaataatttctttatagtcttctttaggctttcctttccatcggtttacttctacttttatgaacttatattcgtacattgctgtataatcctccggaagtgtattggaattgttaccttgtttttcgattatgataaacttgaatccataaatagagcgcgcagcctattaaaagtattgggaattgccatcctgtatttccgtttttaaaataatctattaatgaccatatcagtaaagcgacagtataaaaactaaatgctattctggcggctatacccgattggtgtttttgcatctcatccattttcttcataagaaccgctcccttacttttttttggcgttatagttgaatactttatctattcccgtatttaatgcgtgagctatcgaaaaagccagacttaaagttggatcatatttattattttcaattgcattgatggtttgcctggtcacattgcagagcttagccagatcattttgtgaaatatcagctgctgttctaagttttttaatattgttatccactaaaaccctccttaaatatttttgtttttattttaaattttcaaatttatatatatttattttaaataatatatgtatatgtgtcaaatactttttacacatttgaattttaaggtatactttttgtttttgcaaattagttgtttatataaaaaacggcttgcagtttaacctgcaagcctaaaagtaatcatcatttaaatcattccgcgctgagcaacttcaaattgatgtttcggtgcacttgcgatttcggctgaaacaaaaacagtgcttattgccaagcaagtaagtgctaatttatacttcaatttcatacaacttcacacctccttgaatctgctgtcttgtttcttccacctttaaaaaatatgcggaagccttctcgaaattttctctttcatgataatattttgccacatctaaggaaaaatcttcaagatcagcatacatcgatttatctctgagaaagtcaaaacattccatgattgcttcttcatcaggctcaccgacatataaagattctaaaaattcatactcggcgatatatagggaatcttctgcctcctctgcataagatacccctttgtcatgatattgtctggctatggccatatttccgattttataatgtatttgtgtgattaagaaataggcttgcgggagagaagtgatgatgttcccatcttcaaaaacagctattgcccgttttatgtaatcaatggctggtttgtaattttcttggctgttaaaacaaagtccgatattatatagagtccggcccattaattgtggctgctgttctgcctctgccatggcataagcctttttaaaatgctgaattgcttcatcatattgctttaagtcaagaaagttggtagcgaacaatgaatggcactgaagcacccttatattatatgcctcctgcttatgataaattttataagcctgccgggcataatccatagaaaaataagtctgtttcatataatagtaggactctgacatcttaaaataaaattcagctttctcgatacaatctttgacaaaatcaagcttatattcagctttcttaaaaaactgaatcgctgaaagatattcacggcattccagctcatacatcccccggaaaaaattaaaataataatcaagacgtccggtcagccgggcctgctttttatcaatatccgcgagcagatccgatagtctaggctgttcttctatccgctgcgattccagcggttcgaggtattcgagcatcagattatggcggaattccatgagagaatagtatagatgaagatcctgatcatcttccagacctgcaagttcttctttgatttctctccgcaagtactcggcgtccgggatgctgaaccttcgaatgtacatataccattcgttgattttttctccaaccgctgaagatgataaaacactcgccactattccgaatccctcccttccacgttatgtatatgacatattttatcattttcattcggaaggatagcgcaaaaataccgcaatgttttctttcgttaaaaccgcatgtctgcggatatcatttcaaaaatccactattatccccacaatttgtacaagcaaacaaatacaccttcccatattctgttgtatctgcgtgagcagtgtatgtctgaaaaggaagtgaagatatgagaaataacaagctttcctttaaagaaaaagcaggagccgcacaagaagaatgtttatgtttttgcgaggaagaagcaagccgtgaagcgatgtttcaagcgccgattgaattgcctgaggggtttgtcgttgatccggctgaagctgttgcaggcgtgacgtggaatgcagacagcctttcttgtgtcattgaacgctgtttcattgagacggggccagagcctgatgaaatcggtgttcaattcgcagtgcgcctgcagggaactgttacgcttctcgtcagtgtctcaccagtgcgaaatcaatatggacaagggaacgggtctgtttctgtcatccgcaatgcagagattgaccaagtcgtctattattccgatgagcctgatgattgcccggatgtcagtgacattacgatcgagaaccttattgtcgttccgccattctatggcagtcctttatcggtgacgggcacgattgtgcttgtgcccgaaccgggacccgtttatgcgtttacagcgaatccaaacgatcaatcggtttctgtgatagatacaaacactcacaccgttgtgacaaaaattgctcttccgtaccggccgacaggtattgaaataactccggataaaagcgctgtgtttgttttgcacttcaacaataatgtgatttctgtcatcgattatgacactttaacagtgacagcatccatactgctggatcagccgcctggatcggtaaaatgcatcccaaatcatgagtttgcttatgttctcggcgatactgcgatttatgtgattggaattgatacgttaactgtggataggtcgattcctgtggaaggatttgattttgcaattgatcccaatgggttattcgcctatgttcttgattttggtttagtgcaaaaagtggacctattcaccggtgaagtcacaggaacgattgaacgagagcttatcgtatcatccatagaaacaaattggccggagcggtatgcgtatgtcttagaacaagaattcttattcaattatttgacggttattgacttaaatacgtttacgatcagcattacccaagagctggagcctgatggccaatatgtaatgtttacgagtggatcagaggtgtatttacatgacagcttcactggcaatttatatgctgtcagtccgaatggtgcaggcgttataggaaatgttccgcaatcggcaagagactttgcgtttactccgaatggcgaatttctgtatgctgctcattttttagagcagaacatcactgtttacaacacggatgattattctgtggaaactgtgatatctcttggggtttcaccgggagatattgtgatttaaccaactgcatgctgtacatttctaaaaggacgtgaattcatgaaaaagaatgatctgtctgctttacaggaaaattgtttctgtttttgtgatgaggaaattagcagagaagcgccgtttcaagtgccgattgacattcccgaggggttcaccattgattctgccgaagcagctgcgacggttacatggagtactgctcatttattatgtatcagtgagccttgcttaatccagactgggacggaaccagaagatatcggtattcgatatgccgtgagagtaaaagggaccgttacgcttcttgtcagtgtgtcgcctgtacgaaatcaatatggacaaggggacgggtctgtttctgtgattcatactgaagagattgatcaagttgtttattatgcagcgcagtctggccgctgtcctgatttcagtcaaataacggtggaagatcttctcattgtaccgcctttctacggcagtccgcttacggtgaccgggacacttgttttaccgccaccgccagaccctcaatcgtatgtgtttacagccaattcaggagacagcacggtttcggttattgattcagatttaaacactgttgtaaaaacaatccctttttctgacgtgccaactaatctaggcgttactttcgataaagctttcacgtatgtcctccatgggaataccaaccttgtctcagtgctagataataaaacattaaccatcataaataccatcactgttggaggagggccgagaaaggttgaatttgattcaacagatgagttcgcgtacgtgatggccgccggatctatatatatgatcaacatggcctctcaatcggtcattgatgtcattccgatacccggcgctttagactttgctcttgatccgaatggacagtatgtctataccgctaatggaagcagttggtcggttgataaatatgatgtaaatactgggcagttggtagaaagtatcatagatacatttgaatttcccagtttaattgccactccttacgctggaaattttgcgtatgtgttgaatggtgagctgctgccgaaaggggtaacggagatcagtttgtcaccattaagcaggggaggcgacttcaaccgtttatttgaaactctgaggacgattgtattttctcgcgatagcactagggcttattttctagagccatatagtgaaccgtttctcattaataacttatacgtagttaatacggctggacagaggatcattgcaaacgtgtctctgcccggcgcctttgacctcgccgtaacacctgataatcagtacatttatgcagcacagcccggcgacaataccgtaaccgtgtaccgcacgagtgattatacagccatgacggtgattccggttgggactggtccgtcagcgattgcgatgtagcttatttcacaggttgagagaagcagagctgcgataaaaaaatcgtttataaataaatgagccgatctgctggatggcagccaggatgattaaaaacagcagttcacttacagtgaaactgagcatccgccaaaccccggctcctgtcagcgctcccgcatgcccttttttgaacaggctgacatgctggaaaagctgcagcaagtacgtccgcataaaatacaataaatacaaaatcagtaacaccgcgagtcccattgatacggcaaggggcgtgtgaaagcggaaagggacggctttgacgatttcgaacacgcagccgaatatgatgacttggcataatacagcagccatcacgtgtgtttggcggacgtttttatagctgtcacgcagcgctttgacatcgttggcatttctgctgcacaatctatgttgccggaagtcgcagcagcttcgatgagactgtgtgagtttctgaaaagctgctgtcatgttttttacggattgggtgacatagtgatatgattttctcttctcataaggaactgctttttatgaggtttatcttcaaatctaatgagcaatgatggtaagatagaagcagttgaagtttacaagctgaatgattatactattcaagtcaaagtggaatgatgaaaaggacgtgtcaaaatgaagcaagagacaccgataacactccatgtgaagtctgtgatcgaggatgacggaaatgatgaagtcatcgaattccgtactaccggattttactatgtaaaacaacaaaaagtgtatctatcttattatgaagaacacgacctaggcaaagtaaaaacgattgtgaaggtgagcgaaggcgaagtcctgatcatgaggtcaggcgctgttaaaatgaatcagcgtttcataacgggagcttccacaattgcgaaatataaaatgtcatttggtgagcttgagctggaaacaagcacaaaatcgattcaatctgatctcggtgaagaaaaaggccgaatcagcatcgcatatgacatgcatgtcggagacgggcagcagcatttacataatatgacgatcacgtatgagggaggaactcacgcatgaacattgcggaacaaatgaaggacgtgctgaaggaagaaatcaaagcggccgttctgaaagcgggcctggcggacgaaagccagattccaagcgtactgttagaaacgccgaaagaaaaaacacacggtgattattccacaaacatggcgatgcagctggcgagaatcgcaaaaaaagcgccgcgccaaatcgctgaggagatcgtggcatcatttgataaaggcaaagcttccattgaaaagatggatattgcgggacccggctttatcaacttttacatgaacaacagctacttaacaaaactgattccgtccgtgcttgaagcgggtgaacattacggagagacaaacatcggacaaggcgaaaagattcaggtcgaattcgtatcagccaacccgacgggagatcttcacttaggccatgcgcgcggcgcggcggtaggtgacgcgctgtgcagcgtgctttctaaagcgggctatgatgtgagccgcgaatactatattaatgatgcgggcaaccagattaacaacctggcgctttccgttgaagtccgttattttgaagcgctcggtctcgagaaaccgatgccggaagacggctaccgcggcgaggatattatcgccatcgggaaaaagcttgccgaagatttcggcgaccgtttcgtacacgaagaggagagcgaacgtcaggcgtttttccgtgaatacggcttaaagtacgagcttgataaacttcgctccgatctggaaaatttccgcgtgccgtttgacgtatggtattctgaaacgtcactgtatgaaaacggaaaaattgatcaggcgcttgaggcgcttcgcgaaaagggccatgtatacgaagaggacggcgcgacatggttccgctccacaacgttcggcgacgataaagaccgtgtgctgatcaaaaaagacggctcatacacttatttgctgccggatatcgcataccataaagacaaacttgaccgcggattcgacaagctcatcaatgtatggggcgcggatcaccacgggtatattccgcgtatgaaagcggcgattgaagcgctcggttacaagaaaggcacattggaagttgagatcattcagctcgttcatttatacaaaaacggcgaaaaaatgaagatgagcaaacgtacggggaaagccgtaacgatgcgcgacttgattgaagaagtcggcttggatgccgtgcgttatttcttcgcgatgcgcagcgctgatacgcacatggattttgacttggatcttgccgtatccacatctaacgaaaaccctgtgtattatgcacaatacgcacatgcacgtatttgcagcatgcttcgccaaggggaggagcagggacttaaaccggcggcagatcttgatttcagccatattcaatcagaaaaagaatatgacctgctgaaaacgatcggcggcttccctgaggcagtggcagaagcggcggaaaaacgcattcctcaccgtgtcacaaactatatttatgatctggcttccgctctgcacagcttctacaatgcggagaaagtcatcgatccggaaaataaagagaagagccgcgcgcgtctcgctttaatgaaggcgacgcaaattacgctgaacaatgcgcttcagctgatcggcgtatccgctccggaaaaaatgtaatgatgatcaaaggacaaagtcttcgggctttgttctttttttgtatataaagcgtgtgatgtaattcacaatcccgcacactgagtttttgtatgataagactgatattgaatcagtgaaaggggcaagccgaatgatcaatcgtcaacatattcaattatcgttgcagtcattaagcttagtggcagggtttatggtgtgggtgctgatttcatcgctcatttctcaaatgacatcagatattcatttaagcaaaggcgaaatttcattggtgacggcgattcccgttattctcggatcgcttctccgtattcctttaggatatttaacgaacaggtatggggcgcggctgatgtttatgatcagcttcatcctgcttttgtttcctgtattttggatcagtatcgcggattctttatttgatttaatcgcgggcggctttttcttagggatcgggggagcggtattctccatcggagtgacgtccctcccgaaatattatccgaaagaaaagcacggtgtcgtcaatgggatttacggtgccggaaacatcgggaccgccgttactacctttgcggcgccggttatcgctcaagccgcgggatggaaagcaaccgtgcagatgtatcttgttttgctggctgtcttcgcattactgcacgttttgttcggcgaccggcatgagaagaaagtcaaaatttccataaagacacaaatgaaagccgtttaccgaaatcatgtgctgtggatgttgagcctgttttattttattacgttcggcgcctttgtcgcctttaccatctatcttccgaattttttggttgagcattttgggctgagccctgcggacgccggtctgcggacggccggctttattgcggtctctacgctgctcaggcctgtgggagggtttcttgcagataaactgagcccgctccgcattctgatgttcgttttcgcagggcttacgctgtcaggggtcatgctgtcattctccccgacgatcggcctttatgcgttcggatcgctgacggtggcagtctgctcagggattggaaacgggacggtatttaaactggtgcctttctatttttcgaagcaagcggggattgccaacgggattgtgtctgccatgggcggactgggcggttttttccctccgctgattctggcaagtgtatttcaggcaacaggccaatacgcgatcgggtttatggcgctttcagaggtcgcgttagccagctttgttcttgtgatctggatgtattggcaggaaagaatgaaaacacatacggagagaaacagtcagagcctcaattcataatgatccattcacaagattgttagttttttctgggtgagtgcaaatcaagtcacgttacaatatacatacgcaacgtgactttcttcgaggtgagctcatgaatattctctctgtccgaaaatctgataaagaacttctttcccgcgaactgcatgaattgctggaatcgatcagtacgaaaaggaaaatgaaaaaacatacttatttgtttcaagaaggaatggatgcaaaagagctttatctgattcagtcaggactcattgaaatcggcaagctgacgtctgacggaaaagacctgacgcttagaatctgccaaaaaaacgatattgtcggggaattgacgctattcacagatgagccgagatatatgctcagtgcgaaagtgttagaggatggcgaggtgctcgtcattaataaaaacaagctggaaaaggaattgatccaaaacggtgttttgacgtttgaatttatgaaatggatgagcacccatcttcgaaaaatccagtccaagatcagggacctgcttcttcacggcaaaaagggggcactctattccacccttatccgcttatcaaacagctacggggtggaacgaagtgacgggattctgattaacattgtgctgacaaatcaggatttggctaagttttgcgcggcggcaagggagagcgtcaaccgcatgctgggagacctccgcaaacaaggggttatttcgatagacgaaaccggaaaaattattttgcacaagcgggactatttacgatgcgagatcgagtgtgaaaattgtccgctggagatctgcaatattgactgaaaaaaacaagggcagccggtgtccttgtttttcagcttgtgatacatatacacatgacggcgaaaaagaagccggcatttacgatttccagaatgccgatcgttttcaccggccagtctcttccgtgaaaaaaccaggcccgcagactgcttgggataaaagagagaaacgcccagcctgccccgagaagagccgataaaaaggggagcaagaggtgatatccccacgaccagtatgcaaaggttctgctttttctctcccgtatgaccgatttcacataaaaagaactcccgacaaaaaataaagcagattgcaagaatagaaaccaagcccagccgtcaagggttcccgttcccagccagcagctcgcaagcccgcctgaacaaaagaacagaacacccgcaatatcattcgtgagcgcccgttcgttttttcggcgggcataatgcgtatgtatgagaaacagcggcaataaaaaaacgccgatccagacgagctgcggcttatgatagacagaaatgatcaaaaagcagcaggccggaaaaccgtaataccatatccacttttgatagggctgaagctgtttttttttcaaagcgagcgaaacgggataaaccgctaagtaaaggaacagccagcccagaaagagcggaatatgccagaaaaccgggcctcccttgaccatgccgagtaaaaatggaatcagcagcatcgcccatgcgccgtgctgcttcggaatcatcgccttcatcgaaaccctcctttttatttcattataagtacaaacactctcctgataagtgacttttatcatacaagctgtgaaatacatcactgccgcgcgggctcaatcgggctacactaaagctatccttagcacaggaggctttcctatgaatcagtgtgactatttattatttctgaaacaacttcctatgtttaatgaagtgcctctgtccattgtcgaaaccttgctgaaaaacgggacgtttatccgcggctcatctgaccaatctccatcctttcttcattcacaatccgtttatattgtattaaaaggcaatatccgttttacggacagcaggctccctgaagggtcgcaaaccgttgcgctgtgggaaaaaggcgatgtgtttccgattgatgaaaaaggcgggctctctttatcgccttttatctcagtcaatgcctcaccggatattctggtactccatattccatattccgtatttaagcaaatgatgtcttaccatccgcggctgcaaatgaactttttggcgatgcttcagcaaaatgtcttctgttcctatcagttgtttttgcggtatctgcatacatcacgggatgaaaacgccgaacccggttcttaaacagaaccggttttttttgatgacgccgggcgtccccatatcgtttgaaaatccttcctgctgctctgtgtgaacgttttgtgaaaaaagcagagtgtgtgacatagttcacaaggtgatgcgacgtctctgtttatagtgtacatagcatcacctgactcggaaggagtgaacgatcatgaagaaaaagaaaatgagtccgttgctcaggagattaaactatttttctcctatcgaacatcattcaaataaccatagccaaacgacaagcgaagatcgtgattgggagaatgtatacagaaacagatggcagtacgacaaagtcgttcgctccacccacggcgtcaactgcacgggttcttgcagctggaatatttatgtgaaaaacggaattgtcacgtgggaaggacaaaacttgaattatccatcaacaggcccggatatgcctgatttcgaaccgagaggctgtccgcggggggccagtttttcttggtacatctacagcccgctccgtgtgaaatatccatatgtgcgcggtgtgctgatcaatttgtggcgggaagcattgcaggcgcatcataatccgctggatgcctggaaatcgatcgtcgaaaaccctgaaaaagcgaagtcctataaacaggcaagggggaaaggcggctttgtccgcgcggaatggccggaggtgctgaagctgatttcagcctctctgctgtatacagtgatgaaatacgggcctgaccggaatgtcggtttttctccgatcccggcgatgtccatgatcagccacgcatcaggttcgcgattcatgtcgttaatcggcggcccaatgctcagtttctatgactggtatgcggatcttccgccggcgtccccgcaaatttggggcgaccagacggacgttccggagagcagtgattggtacaattcaggctatattatcacatggggctccaacgttccgttaacgagaacgcctgatgcgcattttctggcggaagcccgctataaaggcgctaaagtcatttcgatcagtcccgattttgcggaatcctcaaagttcgcagatgactggctgagtatccgccaggggactgacggggcgcttgcgatggcgatgggtcacgtcattttgcaggaattttacgtgaaccaagaaactgaacgttttattgagtacgcgaagcaatacaccgattttccattcttcgtcactctgtcaaaagagaacggcgtgtatacagcaggacggtttctgcatgcaaaagacatcgggcggcagacaaaaaatgatcagtggaagccggcggtctggaatgaacagacaggtgcgtttgccataccgcaaggcacaatgggctcccgctgggacgggcagcagaaatggaatctgcacatgatcgacgaagacaccggggaacagattgagccccgtctctccgtgctcggaatagaggacgaaatcggctcagtgcgcattccgtatttttcagatgacggaaacaaagtgcttgagcgggatcttcctattaaaaaactggacctgaacggtgaagagacgtacgtcacgaccgtgtttgacttgatattggccaactacggcgtgaaccggggcatcggcggacaatcagccgcatcctatgatgatccccgtccgttcacacctgcctggcaggaacggatcacgggaattaaaagagaagccgttatacagattgccagggagtttgcccaaaatgcgattgatacagacggcagatccatgattatcgtaggggcgggaatcaaccactggttcaactccgacacaatttaccgtgcggtgttaaatcttgttttactcgtaggcgcccaaggcgtaaacggcggaggctgggcccattacgtggggcaggaaaagctccgtccggctgaagggtggcagacgattgcaaccgcaaaggactgggaaggcgtgcctaaacttcaaaacggcacctcgtttttctactttgcgacagaccagtggcgttatgaagaccagccgatcagtgacttggcttcaccgatcaccgcgtcatcccgctacaggcatcacgccgattacaatgtgctggcggcgcgattagggtggcttccgtcttacccgacattcaatcaaaacggcattgatctgtacaaagaagctgagaaagcgggggcggcgacacctgaagacgtaggtgcgtacgtggcctcacggcttcaagagaaaaaactgaaattggcgattgaagaccctgacaatgaagtgaatttcccaaggaatctcttcgtatggcgggcaaatctgatctcaagctcagggaaagggcatgaatattttctcaagcatctgctggggacgacgaacggtctgatgaatgacgacagcgacagcatccgccctgaagaaatcaaatggcgggagcaggcgccggaaggcaagctcgacttgttaatcaatcttgattttcgaatggcgggtacggcgctgtattccgatatcgtgctgccggcggctacatggtatgaaaaacacgatctcagcagtacggatatgcatccgtttattcatccatttgctccggccatctcggcgccgtgggaatcgaagtcagactgggatatttttaaggcgctgtcaaaagccgtttccgatctggcggaagaagtcgatatggagccggtaaaagaggtagtcgcaacgccgcttctccacgacacgatgcaggaattggcccagccattcggcaaaatcaatgactggagcaaaggcgaatgtgaagccattccgggaaaaacgatgccgaacatccatgtcgttgaacgggattacaaacacatttttcataaaatgaccgcgctcggccctcatacggctttaaaaccgagcggaacaaaagggatgagctggtcgattgcggatgaatatgaatcactcaaacagagactgggagaaaccgattcaaacagcgttgccaaaggatgcccgaatataagtgaagcgaagcaggcggcggaagcgattttaaccctgtcgtccacctcaaatggaaaagtcgccgtgaaagcatgggaatcacttgaaaacattaccaatctggagctgaaagacctggcggaagagcgcgaggaagaatgctttacgttcgagcaaattacagcccagccgaaaacggtcatcacctctccggcctttaccggttcagaaaaaggagggcgcaggtactcgccgtttacgacgaatgtggaaaaattaattccgtggcggacgctgacaggcagacaatcctattatgtcgatcatgaactgatgatggaattcggtgaaacgatggcgacatttaaaccgatcctccagcaccgtccgttcctaagcaagcggcctgatcaagagggcaaagaaatcgttcttaattatttgacgccgcataataaatggtccgtccacagcatgtattttgattctctgccgatgctgacgctgttccgcggcgggccgaccgtgtggatgaataaagatgacgcagaggacacggatatcaaagacaacgattggattgaatgcttcaaccgaaacggcgttgtcgtcgcgagagcggttttgtctcaccggattcctaaaggaatggcgtttatgcaccatgcccaggaccgccacatcaatgtgcccggcacaaaactgacgaataaccgcggaggcacccataacagcccgacaaggattcacgtcaagccgacccagatgatcgggggctatgcccagctcagttacggctttaactattacggtccgacggggaatcagcgcgatctgaatgtcgtcatccgcaagctgaaggaggtcgattggcttgaagattaaagcgcagatcgggatggtcatgaatttggataaatgcatcggctgccacacgtgcagcgtcacctgcaaaaacacgtggacaaaccgttccggtgcggaatatatgtattttaataatgtagaaacaaagcccggcatcggctacccgaagcaatgggaggaccaggacaaatataaaggcggctggacgttgaaaaaaggaaagcttgaactgaaatcaggcccgaaaacaaaccggcttgcaggccttttctataatccgaatcagccgacgattgatgactactatgaaccttggaactatgattatgaaacattaacaaacagcccgcaaaaaaagcaccagccggtggcgcggccgaaatcgtccttaacgggggattttatgaatatcgaatggggtccgaactgggaagatgatctcgcgggcggccatattacagggcttgaagatccaaacgtgcaaaaaatggaggaatcgatcaaaacagaattcgatgaagtctttatgatgtatcttccgcgtatttgtgagcactgcattaatccggcgtgcgtgtcctcctgcccgtccggcgccatgtacaaacgcgaggaagacggcattgtgcttgtggatcaaaatgcatgccgttcatggagatattgcgtctcatcctgtccttataaaaaagtctattttaactggcagacgaacaaagcggaaaaatgcacactctgcttcccgcgattggaggcagggctgccgaccatctgctccgaaacgtgtgtgggcagaatccgctatctcggcgtcatgctgtatgatgcggacaaagtggaggaagcggcctctgttgaaaatgaaaaggatctctaccattcccaactggacgtttttcttgatccgaatgatcctgagattgccaaactggcaaaagaacaaggcatcccggctgaatggatagaagcggcgcagcaatcgccgatctataaaatgatcattgactggaagattgcgcttccgcttcaccctgagtaccgtacgctgccgatggtttggtacattccgccgctcagcccgattatgaatctctttgaaggaaaaggcagccggcaaacggcggaagcgatttttccggctatcgaccaaatgagaattccgattgactatttggcgcagctgttaacggcgggggatacggatcatattcggtccacgttaaagaaaatgtctgtcatgcgccagtatatgagggcggttcagacaaataaatccatcgacccggcattggtctccagtgtcggcttaacagaacagcaaattgaagacatgtatcggctgctggcaatcgccaaatatgatgaccgttttgtgatcccgagcagccatcgagaagaagtgtcagatttatatgctgaacaagggagctgcggcttatcattttcaggcggccccggctcctgtttctaatttttcataaatgaggtgtaataacatgaacaccacagaccggcaaatgacgttctccgctctttccgttcttctctcttatccggatgaagagtggagagccgagattcccgattggaaggctcttatccatgacatcaccaatcagcaaatccgggagaaattgctgcactttttagaggcggcagccggcttttctccgcaagcgctgattgaacactatgtgtatacgttcgatttcggaaaaaaaacgaatatgtacgtcacctactttaactcaggcgaacaaagggagcgcggcattgaattgctgcatttaaaaaacacctaccagcaatccggtttcctgccgacagagaaagaactgcctgattacctgccgctgatgctggaattcgccgcggttgcggagattgaagcggcgagaagcgtgtttgagaaatacgtgtctaatgtgagggagctggcttcccgcctcgaaaaaaataacagcatctatgctgagctgctgcacgtgctgcaggccgcactggaaaacatcggtgtacatgaaagcattgaagaaggggctgttcaggcatgagcgggcagatcctgtggggcgttatgccatacattgtattgacgatctttatcggcgggcatatttaccgctatcagcatgaccaattcggctggacggcgaaatcaagcgagctgttagaaaagaaaaaacttgccgctggcagcacactttttcattggggactgctgtgcgttgtcggcggacatgtcatgggaattctgatcccggaaggcgtgtatgcttcccttggcatttcagagcatatgtatcacaaaatggcgatcggcgcaggcctgccggcggggattgctgcatgtgccggacttgtcatcctgacatacagaaggctgtttgacaaaagaatccgcaaaaccagctcgccatcggatatcttgacgcttattctgctgctgttcatgatgctgtcgggcgttgcggccacgtttctcaacatcgattcgaaaggatttgattacagggcaacagtcgggccgtggttcagggaaattgttttgttccggcctgacgcttctttgatggagagtgtcccgctatggtttaagtttcatatcatcatagggtacgccgtttttatcctttggccgtttacaagattggttcacgtgttcagcctgcccctcaagtatttgacccgcagctatgttgtctatcggaaacgcacgtaaaaatcccccctgcaagagggggattttttatggtgaaaaaataaaaacataagatattttctgccaaggtaatggctgggcggcggggattcctgttatgttttatttggaaataacatcaacaaaaggagagtgaagaatgaagcggattttcctcattttagccgcctgtctgatgacaagcgccggcgtcctgacactcagacattctcatgtattaaccggcggcacagcgggactgtcactaagcctgtcatacttgtttcattcctcttttgcgattatcttctttctgatcaatatcccgttttatatattttctctcatcagaatgggaatcaaattcactctatccaccgtttttgcagtcacagtactgactctgtttaccggcgcggatcactggctgccgccggtctctgtttcaccgcttgccggggcgatttgcggcggggcgctgatcgggttcggcctgtcgctcatgttttatcatcaggcatcgctcggcggcgccaatatcctcgctttatttctgcaaaagcgctgcggatggaatccgggtgccgttaatttcctcttcgattttggcgtcgtgctggccggcattttttccgtcgggttgctgaaagggctcttctccttagtgtcgatagcggtcaccggtctgatcatcggcatcttcaaaaataaaatcaaaggcagctgctcgctcaatccggcattgcttcagaacatcacacccggccaatcacaagaagcttcatcataagcctttccgctcgtgcggagaggctttttcatatgtttacaggcctgaaaacagagggtatacagagatatcggatcagatgggagagagtcgggatgctgaaaaggagactggaattttgctttttatatatgatgcttatcggagtatatgtcatatggttttttccggtttccaggcttgagttttacggaggggtgctttgttatgcaagcattattttgttcagcatctattcgttaattcttgaaaaccgcacctcgcagcacacgctgttatggattcatattcttgtgttttttccgatcgccgggtacttattttaccttttttccggccagctttatgaaaaaggcaagctgttcaggtcgaaacggacatacaaccgggaaaagctgagaacgatatttgatatggaacaaactcccgacctgtccgggctgaaaggaaatcagaagcgtttctttcaatattcaatcaaggcgtcccatatgaatattaatacaaaaagcaggctgaaggtgctcaaaaacggggacgaaacatttccggagctgtttgaggcgctccgggaggccgcgtcatttatacatattgagtattacatgttcaaatcagacatgctcgggcacaagatgatggacattatgatggaaaaggcgcgtcaaggcgtggaagtgcggtttttgttcgacgcggccggcagcctgaagctggccggaaaagatattaaaaaactgaaacgcgcgggtgtgaacatcgtcccgtttctgccgctgaaatacggttttttcaaccaaaaattcaatttcagaaatcaccgcaagatcgtcatcgttgacgggaaagtcggttttgtcggcgggctgaatgtcggcaaggagtatatcggcaaagaccaagatgtcggcttttggcgggacacccatatgaaagtcgaaggagaaatcgttcagacgctccacagcatttttatgcttgattgggaatacgtttcggatgaggtgctgattgatcagaaagcatatacccgcccggttgcggcagaaagcggcggcgtctatcaagtcgttccgacaggccccgatatgaaggagcggatgagcgatctgtattatgccatgatagcggcggccgaatcgtctgtatggatcgcgacgccttatttcgtgccgaatgagccgatccgcacagcgctaaaggaggctgctgccagaggcgtccgggtgcgtgtcatggtgccggaaaccaatgacggatttttaacccagtacgcgacgagatcgtatttccccgagcttcttcgcgaaggaatcgaagtctattcttatcaaaaaggctttatgcatcaaaaggtgctcatcactgacggaaacctcgcctctgtcgggacggcgaatatggacatgagaagctttcagctgaactttgaagtcaatgtcttttttacagatcaagaggcgatcaaagatcttgaagcgcattatctggaggatatgaaggagtctgaaaaaatcagccccgtccgtttctataagcgcacattatgggaaagaacgaaggaatccttcgcacggttattttccggcgttttataaaaaacgcttttaaaactccttgtgtatagtataattgagaaatattatcattaagaacgaggcacaaggaggacggaatcgtgctgcgacaatttttttcttattataaaccgtacaaaaagctgttttttctcgacttcttttctgccatcgccggcggattgatggagctgagttttcctctgattgtcaattactttatcgatacattgcttccggggcgggattggagtctgattattttgacttccgctgctttattcggggtctacgccctcagctcggcacttcagtatgttgtgacgtattggggccatatgctcggcattaacattgaaaccgatatgcggaaaaagcttttcgaccatctgcaaaagcttccgttcaaattttacgataacaacaaaacgggcagtttaatgtccaagctcaccaatgatttgatgtatatcggagaaaccgcccaccacggacctgaagacctgtttatcgcgatcatgacgattttgggcgcattcggtgtgatgctgtttattaactggcagctcgcgctgttgacttttatcattatgccggtcgtcatatggcttgctttgtatttcaataaaaaaatgacctctgcgtttacaaaactgaacaaagacgtcggagacttcagcgcgagggttgaaaacaatatcggcggcatccgtcttgttcaggctttcagcaatgaagcgtttgaaacgcagcggtttgacgtgaacaatcagcgtttccgcaaaacaaagctgacgtcttataaaatcatggcgaaaaacggctcgatcagttacatgctgacaagattcgtcacgctgttcgtcttattgtgcggcacatggttcgtgatccgcggatcgttatcttacggggaattcgtcgcttttgtgctgctgacgaacgttctgttccgtccgattgataaaatcaacgcgattattgagatgtatccgagaggcattgccggttttaaaagctttatagaaatactggaaacggagcctgatatcaaggacgccccgaacgcgagacatgtgtccggtttaaaagggaatatccgttatgatggtgtgtcgttcggttacgaagaaaacagtccggttctgtcgggaatcaatttgtccattcatgccggggagacagtcgcattcgtcgggccttcgggagcgggaaaatcaacgctgacaagtctgctgccgcgcttttatgagccgtctgaaggcgtgatttccatcgacggaatcgatattaaggacatgacgctgtcatcattgcgcggacaaatcggcgtcgtccagcaggatgtctttctgttttccggcacattgcgggaaaacattgcttacgggcggctcgacgcgtctgaggaagaaatctggcaggccgtccgccaggcgcatttagaggacttggtaaacgggtatcccgacggtttaaacacggtgatcggcgagcgcggcgtgaaactgtcaggcgggcagaagcagcggctttccatcgccagaatgtttttgaaaaacccgtcgatcttaattttagacgaggctacatcagccctcgatacagaaacggaagccgccattcaaaaatcgctgcaagagctgtctgaaggacgcacgacgcttgtgatcgcccatcggctggctacgattaaggatgcggacaggatcgtcgtcgtcacgaaagaaggcatcgctgaacaaggtcatcataaggaactgctggcatccggcggcatgtaccagagacttcatcaggcccaattcggcgagctgattcattaataaaagaaaaaggatagacgagcgggggccgggcagcctcctgtctatcctttttttatgtagtccgtatttaatgggcttctttttgcgcaggttcgatgatatgtttgaaacggtcaataagctgcaccgctttctttccttccactacaattaaatattcttgttctttatgggccattctgaacgtttccagctcaatgatatctttgatcttgcacattgtttttttagagtagatatacagctcgtggccccccgtgtggcaaagctgataaagctgaagcatgtttcttaaagtgaacttcttagcggctattttcaaagatgtaatgtttttcatatgttttctcctccgtctgatggtctgttatttcggaaattccccatataaacgggtgataaacctggttatgccttccacctcagcactccgcccgccaggcgtttgactccccggatggcgcttaattcttcgacgagccggagcagcgcccggtctttctctttcgcctcaatcataaaatcgatgtccgtatcccattgtcgaaaccgctccagcaccggcagaataaaattcgcatccacatagtccgcatgactgcgtatggctgattctgattttggcgaggagagatggaccttcggctttaagccgatccgctgccatgttttgatcatccgcggaagaatgtcatctaaatcagcgtcatcggtcggattggcgtaaaaatggtgataatcaaacacaaacggaatgccttcttgttcacatacactgagtgtttcctcggacgtatacgttttatcatcgttttctaaagtcatccgctgtttgatgacatcgggaagttctttcagattcacgcggaaacggccaagcgcgctttgtttgtcaccgtaagcgcctccgacatggatgttgatgacggaacggtccgcgatgcccattgcgtccagcatgtcataatgataggccatatccttgaccgcatttgcggtaatctcctgtttcgggcttgtaaaaagcgtgaattggttcggatgaaagctcgttctgagatcatattttctgaccagcccgccgatctcacgaaactcctggcgaaacggcgtgacaaaatcccacagcacatccggatgggtggcgagcggcacaatcgagcttgagaacctgtacagcgggatgccgtggctgatcacatagtggatggtgcgcagcgtattggtaagatttgcttttgtcacagaaagcagggcgtctttccgctcactgcgggaaagcttggtatagcgcgcatatgttaaggtttttgcgggggacgcgtcccaaaggcgcatggcgtttgcgacgaatccgaatctgaacagcatatggtttctcctttataaaaagtaagatatggcctttcccagccattctgcaggaagctgtctgacggagcgctgtttcactttttctaatgtgagaagctcggatttttcgatgtcctgctttatggttgaaagcacttcctttgtaaaggcttcatcatgaatgatgacattcacctcttcattccagaacagactccgtttatcaaaattcggcgtgccgataatgctgatgcggtcatcaataatgaaagctttgacatgataaaagccttgataataccgatagatgaggcagccggccttcagaagctcgggataataggtaaaagctgtttcccgaacgagcgggtggtctgacttcatcggcacgatcaagatgactttgacgccttttcggcaggctgaaataagcgcttcctgaagctttttgctcggtacataataaggcgtgccgataatgatttttttctccgccttacggatgcagttttcataatgcgattcaagcgaaaaaccgtcagacgcatatgtcctatgagagatattcccttcggataatgccggataaaccccgggtgatccgggtgcttttccggtgtttcgtttcagatcgcttacaaaaagagtctgaagatcggccgtgccttcgccggtcatccgcaggtgataatcctcccagtttccgaacttcgcttttttgccgaggtactcttcagcgatattaaaaccgccgacatagccgattttgccgtcaatgacggtcactttccggtgattccgtttttgcagcctgaaaaaaagaaacggaaatgccggtttatttagaaaatgaacgtgaacgccggcttttttcatcgtttgaatggaaggctttttcacttggcggctgcccgcccaatcgagcagcagatatacggagacgccggcctgggccttttccttcaataaatgaaacatctcatggctgacttggtcgttcttcataataaaaaacatcatatgaatagaagagacagcttggcggatatcagccgtcatctgccgcacaagctcgctgccgcagtgaatgagtgtgatatcactctttttcgggtcaaaaacgggctcatacgcctgttttttgtacgccgcccggccaagcagaatatcaagcagcataagtgcgatcaatatgataaaaatgacaagcaacacaaaaatgaccttcataccgacgctcctttccgaagtattcgtagtgtgccctgagaatgtgaatttaattattgactgaacactcattcattatttatgataaagtaaagatatgacaatgaagaggggtatcagaacaaagggggagacaagatgaacgcatttctcatggtaaacgcgctgctgttttcagctgtaaccgcttacgccgtttatttattcgtttacctgatcagaacgaggatcgcttatattaagctcggccaaagggaagaatttgataaacgcctgaaagaacgtcttcagaagatatgggtgaatgtgttcggacaaaaaaaactgctgaaagataaaaagagcggcatcatccacgttctgtttttttacggttttatactcgttcagttcggcgcaattgattttattctgaaagggctgcttcctgaccgtcatctgccgttcggtccgctttatccggcgtttaccttttttcaggaaatcgtcacgtttctgattttaatcgccgtagtctgggcgttttaccggcgctacattgaaaaactcgtcagactgaaacgcgggtttaaagcggggcttgtcctgctgtttatcggcggactgatggtgacggtgcttctcgggaacgccatgaaccttttatggcacgatcattctctgtcttggacggagccgatcgcttcctctattgcgtttgtgctcggcggtctttcagcgccggcggcagccgccgtgttttatgtttcatggtggcttcatctgttgtttttgctcagctttttagtgtacgtgccgcaatcaaagcatgcgcacttaattgcgggtccggcgaatgtgttcctcagcaggctggattcaaaaggaaagctggaaaaaatcgatttcaccgatgagacgaaagaaagctacggcgtcggaaagattgaagacttccgccgctctcagcttgtcgacctttacgcctgcgtcgaatgcggccgctgtacaaatatgtgtccggcctccggtacgggcaagatgctctcgccgatggacctcattttaaagctcagagaccatttgacggaaaaaggcgctgccgtgacgtcaaaatctccgtgggtgcccgcgcccgtttttcagcacacgaaagcgaatcagctcgccgcggcttcctcagggggaggatcgcgtgaagcggccgcagccattgattacaacccgagcttaatcggcgaggtcatcacggaagaggagatttgggcgtgcaccacttgccgcaactgtgaggatcaatgtccggtcatgaatgaacacgttgataaaattatcgatcttcgccgttatcttgtgcttacggaagggaagatggacagcgacgcgcagcgggccatgacaagcattgaaagacagggaaacccgtggggcttaaaccggaaagagcgggagaactggcgggagcaggctgatacagaaattccgacagtgaaagaaatgaaaaaacaagacaaagagttcgactatttgttttgggtcggatcaatgggttcctacgataacaggagccaaaagattgccgtctcatttgcaaagctgcttaatgaagcgggcgtatcctttgcgattctcggcaataaggaaaaaaactcaggcgatacgccgcgccgtttgggcaacgagtttctgttccaagagctggcggaacacaacatcggcgaatttgaaaaacacgggatcaaaaaaatcgtcacgattgatccgcacgcttataatatgttcaaaaatgaatatcctgatttcggattccgggccgaagtctatcatcatactgaattattagccgagcttgtgtcacagggaagactaaaaccgcttcacccggtgaatgaaacgattaccttccatgactcgtgctatttaggaagatacaatgaagtgtatgagccgccgagagcgatcttaaaagccattccgggcgttcaattgaaggaaatggagcgcagccgcgaaaacgggatgtgctgcggcgccgggggagggctcatgtggatggaagaagaaacgggagcgagaatcaacacggcccggactgagcaggcgctttctgtcagtccgacggtcatcagctccggctgtccttactgtctgaccatgctcggtgacggtacgaaagcgaaagaagccgaagacgcgatcggcacttatgatgtcagtgaattgctcgccatgtctgtattcggcgccgaaaaacaagagtctttatagaaagaagcgggccgccggcgcatatgccggcggctttgttttcgcacatcagccgatttatgaagggacggctctaaaatttcttaaattacgctgttaagggtagcatattctgttttaatttgtttataatgagaggtatggtttatgaacaaaacaatacaaattcgttcttattataggatagaaacagatacatataagtaatagaaagggagtgtccgaccttgagtatcaaacaatattctcaggaacagctgaagcagatggctttagttgaaatcgctcacgaaattttctcagaacataaaaaaccggttccgttccaggagctgctgaatgaaatgatctccttgctcggtgttacgaaagaggaactgggtgaccgtatcgcccaattttatacagacctgaacattgacggccgctttattgctctgtcagaccagacgtgggggcttcgcagctggtatccgtacgatcagctggacgaagaaacacagccgactgtaaaagcgaaaaagaaaaaagcgaaaaaagtcgttgaggaagatctcgaccttgatgaattcgaggaagttgacgaagatgacatcgatctcgatgaaatagaagaagatattgaccttgaagcagacagctttgacgacgaagatatcgatgaagaagatgacgacgagcttgagatcgaagacgagatgattgaagaagatgaggaagattatgatgatgaggaagaggatcgcaaagactgattttatatcagcaaaacgatcttgactttcattgtcgaactatgtagtatgtattttgggctcttcaaaaagaagagaattcataagagtgctacgctccctttcaagaaattgaaagggagctttcttattttcatctcccaaattcttttacacatcatttgtttttagtgaaatgattttctataaaacggcacattttaaggaatgtagcgcagaccgaagagaggagcaaacgaaatgacgaaatatatttttgtaaccgggggagttgtatcatcactcggaaaaggaattgtggctgcgtcacttggccgccttttgaaaaacagaggcatgagcgtcaccatccaaaaatttgacccttatatcaacgttgacccgggaacgatgagcccgtaccagcacggtgaggtattcgttaccgatgacggcgctgagactgaccttgacttagggcattatgagcggttcattgacattaatctaaacagattcagcaacgtgacgaccggtaaaatctattctgccgtattgaaaaaagagcgccgcggggactacctcggcggaacggttcaggtcattccgcacatcacaaatgaactgaaagaccgcgtgtaccgtgcaggcaaagaaacaaacgcagatgtagtcattactgagatcggcggaacagtgggagacatcgaatcccttccgttccttgaagccatccgtcaaatgaaaagcgacatcggccacgaaaacgtgatgtacattcactgtacgcttgttccgtacatcaaagcggcgggcgagctgaaaacaaaaccgacgcagcacagcgtaaaagagctgagaagcctcggtattcagcctaatatcatcgtcgtgcgcacggaaatgccgatttctcaagatatgaaagataaaatcgcgctcttctgcgatattgacacgaaagcggtcatcgagtgcgaagatgcggacaacctttactccatcccgcttaaccttcaggagcagggactcgataagcttgtctgcgatcatatgaaattagaatgcaaagacccggatatgacggaatggaaagaccttgtcacgaaagtgaaaaacttgtctaaaaccattacaatcagcctcgtcggtaaatacgtcgagcttcaggacgcttacatttcagtcgttgaatcactgcgccacgccggctatgcgtttgacgctgatgtgaagatcaaatggattaacgccgaagaagtgacagaaagcaatattcaagagctgactagcggcacagacggaatcatcgtgcccggcggtttcggagaccgcggcgtagaagggaaaatcatcgccgccaagtatgcgcgtgagaataaaattccgttcttcggcatctgcctcggtatgcagattgcatccattgaatatgcgcgaaacgtattaggtctggaaggggctcactctgcggagatcgatccgtccactccttatccgatcatcgatcttctgccagaacaaaaagatgtcgaggatctcggaggaacgcttcgtctcggactgtacccttgtaagcttcaggaagacacgaaagccttcgaagcgtatgcggatgaagtggtatacgaacgccaccgccaccgttatgaattcaacaacgaatacagacagcaaatggaagagaacggttttgtgttctcaggcacaagccctgacggccgtcttgtggaaatcatcgagctgaaagaccatccttggtatgtcgcttgccagttccaccctgagttcaaatcaagaccgacaagacctcagcctttattcaaagactttatcggcgcttccgtacaagctgcagaacagaagtaataaaaaaagacttgcctcctttaaaagtggcaagtcttttttctgcatcaggcatattcctgcatcatttcctttaacgtaaaggacagtgcgtgatagacatacaggcctgtcattaatgaaggaaagccgtatcttgtcccgtcttcatcaggcagaagcggcatttttaatttgctgtcaatatgaacatcacaaaattcctcaatcccggtttgatctttgatgacaggagatacgccaacgaggccgatccctttttcataaagcttttgagccagcgcctgttcttcagccgtgcccggacctgaacaaaacatcagcaccctgtcgctttctgtaatcgaatcagctgtatccggaaacgctttgacggaaggcatcggttctgagccgagttccgcctcgcacaaaatgccctgcatctcatttgcgccgtataaataaatggtatggccgctgacggctgcctgcgccagcaggcgcgcgccgtcttctattgcttcggattccttatcctgaatgcgggaaaaaatgcctgcaagctgcgtcgtaaatatctttaacatgagtgaaacctcctttacacatacaagaacagtatacaacaaaagagaaaatgctcagaaaatgtcggaaagtagactattataattaaaggaaatgtgaaaatcaaacagaatacataaacaactgcttccttttgacgaaaatgataatattggggtgtaaaatgatgaatgaaaagattttaatcgtagatgaccaatacggtatacgcatattgctcaatgaagtgtttcataaagaagggtaccagacgtttcaggccgccaacggcatacaggcgctggacatcgtaacgaaagaacggcccgatctcgtgcttttagatatgaaaatccccggcatggacggaatcgaaattctcaagcgcatgaagatgatcgacgaatccatccgcgtcattatcatgaccgcttacggagaactcgatatgattaaggaatcaaaagagctcggagcgctgactcattttgcgaaaccttttgacattgatgagatcagagacgcggtgaaaaaatatttacctctaaaatcgaattaataaaattagaaacaattatgtcattgtgttgccgatttgtcgaaaagttggtatcctagagatggagaaaaagcgatctgttgttttacatatgacaggtttttatggtcatgctataggtggaaagcttttttcgagaagaagcaaatcaggctatataaggaggactttcgacatgcctttagtttcaatgacggaaatgttgaatacagctaaagaaaaaggatatgctgttggacaatttaacttaaataaccttgagttcactcaagctattttacaagcagcagaagaggaaaaatccccggttattcttggtgtttcagaaggcgcgggacgctacatgggcggcttcaaaacagtggttgccatggttaaagctcttatggaagaatacaaagtgacagttcctgtcgccattcacttagaccacggttcaagctttgaatcttgtgcgaaagcgattcatgcaggcttcacttctgtaatgatcgacgcatctcaccacccgtttgaggaaaacgtagcaactacagctaaagtggttgagcttgctcatttccacggcgtttcagttgaagctgagcttggaactgtaggcggacaggaagatgacgtgatcgctgaaggcgtcatctatgctgaccctaaagagtgtcaagaacttgtagagcgcactggcatcgactgccttgcacctgcactgggttctgttcacggcccttacaaaggcgaaccgaacctcggcttcaaagaaatggaagatatcggaaaatcaaccggccttccattagtacttcacggcggtacaggaattccgactgccgacattaaaaaatcaatctcacttggtacggctaaaatcaacgtaaacactgaaaaccaaatttcttctgcaaaagctgtccgcgaaacattggcagctaagccgaacgaatacgatcctcgtaaatatcttggacctgctcgtgaagcgatcaaagaaacggttatcggcaaaatgcgtgagttcggttcttcaaaccaagcttaatccaatgtaacatccataaaccgcctgacagcattgacaggcggttttatgtcttacctttagaaagcgcaatcatgttttacagttctgaaaatttattactggggaggctttccttatgttatttttcattgatacagcaaacattgacgagattaaagaagcttatgaacttggcgttcttgccggagttacgacaaaccctagtttagtggcgaaagaagctgacgtgtctttccatgacagacttcgtgagattacggaagtcgtgagcggatcagtaagcgcggaagtcatttccctgaatgctgaagagatgattgaagaaggtaaagaacttgcgaaaatcgcaccgaatatcacggtgaaaatcccgatgacgtctgaagggttaaaagccgtaaaagcgctgagcgacctgaacattaaaaccaacgtaacgctcattttcagcgccaaccaagcgcttttggcggcaagagccggggcgacttatgtatctccgttcttaggccgtctggatgacatcggccataacggtcttgaactgatttcagaaataagacagatttttgacattcatgacattgatacacaaatcatcgcagcttccatccgtcatgcgcagcacgtgactgaagccgctttacgcggtgcgcatatcggtacgatgccgctgaaagtcattcaccagctggcgaaacatccgttaacggataaaggcatcgagcaattcttggcagactggaataaataagggtgaaaagggcggcaaaccggttgcatccgtttgccgcacccttatgttttcctgtttggcagcgggccttcagtatcaaagtgaagagtgtgtttccccggaatgtgaacccggcgggcctctgtgcatcctgtgttaaaaatgccccgcaaagcttcgctattttcttcctgttattttataatgtccttgtattctttctcttcgaattggctacattttggacaagagctttatttgcagagacagaataaaatgccattttatttacgctccgcagctatcttcttatggaaggagactatcatggaaaagttgaatattgccggcggcgatccgttaaacggaaccgtacatatcagcggcgcgaaaaacagcgccgtcgcattgatacccgcaaccattctggcaaattccgaagtaacgatcgaagggcttccggagatctcagatattgaaacgctgcgtgacctgctgaaagaaatcggcggaaacgtccattttgaaaaaggagaaatggtcgtcgacccttccccgatgatcagcatgccgcttcccaacggcaaagtgaaaaaactccgcgcttcctattacttaatgggcgcgatgctgggccgcttcaaacaggcggtcatcggactgccgggcggatgccatctcgggccgcggccgattgaccagcacatcaaagggtttgaagcgcttggggcggaagtcaccaatgaacaaggcgcgatttatctgcgcgccgaaaggctgagaggcgcacggatttatttagatgtcgtcagcgtcggagcgacgatcaatatcatgcttgccgctgtactggctgaaggtaaaaccgtgatagaaaacgccgccaaggaacctgagattattgatgttgccacattgctcaccagcatgggcgcaaagatcaaaggcgcgggaaccaatgtaatcagaattgacggcgtaaaagagctgcacggatgcaggcatacgatcattccggacagaattgaggcgggcacctttatgatcgccggcgccgcgatggggaaagaagtcattattgataatgtcataccgactcacctggagtctttaacggcgaagctcagggaaatgggttttcacattgagacgagtgacgatcagcttcttatgctcggcgggcagaagcagataaaaccggtcgacgtaaaaacgcttgtttacccgggattcccgactgatcttcagcagccgatgacatctctgttaacgagagccagcggcacgagcgtcgtaaccgacaccatctactcggcccgatttaaacatatagatgagctgagacggatgggggccaacatgaaagtggaaggcaggtcggccattatcaccggtccggccgagcttcagggcgcaaaagtaaaggcgagcgatctgcgtgcaggcgcttgtctggtcgtcgccgggctcatggctgacggcgtaaccgaaattaccggtctcgagcatttagaccgcggctacagcaatcttgagaaaaaacttgaaggtctgggcgccacaatctggcggcaaaggctgacggacgaagagatagaacagctccaaaattcatagaaatgcggacttttgagaggagatcgtgttgaaatggaaagaagcttatcgatggaattggttcgagtcactgaagcggcggctttagcatctgccagatggatgggccgcgggaaaaaagatgaagctgatgatgcggcgacaagcgcaatgcgtgacgtgtttgacacggtgccgatgaaaggcacggtcgtgatcggggaaggcgagatggatgaagcgccgatgctttacatcggcgaaaagctcggaaacggatacggccctcgcgtcgatgtcgccgtcgatcctcttgaaggcacaaacatcgtagcgagcggcggctggaatgcgctgacggtgatcgcggtcgccgaccatggaacactgctgaacgccccggatatgtatatggaaaaaatcgcggtcggtcctgaagcggtaggctgcatcgatattgaagcgcctgtcattgataacttaaaagccgttgcgaaagcgaaaaacaaagacattgaagatgtcgtggcaaccattttaaatcgtgacagacacgaaaaaatcatctctgaattgcgtgaggcgggcgccagaatcaaactgatcaacgacggtgatgtcgcgggcgccatcaatacggcctttgaccatacgggagtagacattctcttcggttcaggcggggctcctgaaggcgtgctgtctgccgttgcgttaaaagcgctcggcggcgaaatcatcggcaggcttctgccgcaaagtgcggaagagcaggcccgctgtgagcgaatgggccttgatgtatccaaagtgctccggatggaggaccttgtgagaggggatgacgccatttttgccgcaacgggcgtcacggacggagagctgctgaaaggcgttcagttcaaaggctccgtcggcacgactgaaagtctggtcatccgggcgaaatcaggaacggtccgattcgttgacggaagacacagcctgaagaaaaaaccaaatcttgtgatccggccataaatagagaaaagcgggacggaaagtcccgcttttcttttgcaataaagagtcaaccctatcatttatatgtcaaagcattatttaagttgaataattttttgaaatgaggtaaaaataaagagtgctgcgatttttctgtgtcattccttcttttgagtactgggaaattttcaaattctaccgcatacagacgatataaatattgatcttctcaagtttttgtcctcgcttccttcaaaactcattaagacattccttttttaaaaaagcgccgatcatgggtggaagtgttaccgatagaagttcctgaacgttttataaaagaatgtgctttggcggaatcatgcgaagcagccgatttgaatgaaaacagcaatacattgactatgaaaagcgtggtgtttttatgaaagacgtatctatttcctctttggaaaatatgaaattaaaagaactatatgaactggccagacattataaaatctcctactacagcaaactgactaaaaaagaattaatctttgccattctgaaagccaacgccgagcaggaggatcttctgtttatggaaggcgtgctcgaaatcatccaatcggaaggattcggcttcctcagaccgattaattactcgccaagctcagaagacatctacatttctgcttcccagatccgccgctttgatttaagaaacggtgacaaagtatccggcaaggtgcgtccgccgaaagaaaacgaacgctattacggacttttgcacgttgaagcggtaaatggagacgatccggaatctgcgaaggaccgcgtccattttcctgcgctgactccgctttatccggaccgccaaatggtgcttgagacgaaaccgaattatctctcaacaagaattctcgatatgatggctcccgtcggtttcggccagcgcggtctgatcgtggcgccgccgaaagccggtaaaaccatgctgttgaaagaaatcgctaacagcattacgacaaatcagcctgacgctgaattgatcgttctcttaattgatgaaagaccggaagaagtaacggatattgaacgttccgtagcgggcgatgtcgtcagctcgacgttcgatgaagtgccggaaaatcacattaaggtagcggagcttgtgcttgaacgggcgatgcgtctcgttgaacacaaaaaagacgttatcattctgatggacagcattacccgcctggcacgggcctacaacctcgttatcccgccaagcggacgtacgctttccggcgggattgacccggctgcgttccatcgtcccaagcgctttttcggtgccgcgagaaacattgaagagggcggcagtctgaccattttggcgacggcgctcgtagacacgggctcccggatggatgacgtcatctatgaagagtttaaaggaacgggcaacatggagcttcaccttgaccgttctcttgcggaaagacggattttcccggcgatcgatatccgccgctccggcacacggaaggaagagctgctcgtgccgaaagagcatcttgaccgtctatgggcgatccgcaaatcgatgtctgattctccggacttcgcagagaagtttatgagaaaaatgaaaaaaacaaaaacgaatcaggaattcttcgatctgatcaaccaagaatggaagcaggcaaacctttcatcatcagcccgccgctgataaaaaatgtatttgcaaatgcagtaaatgactgatataattctctcatatgcgttccggattactccggaataataactctgtttccacacgggattcagggcggaaggagatggatacaatgaaagcaggaattcatcctaatttcaaaaaagcaacagttaaatgcgcttgcggaaatgaatttgaaacaggctcagtaaaagaagaggtacgcgttgagatttgctctgaatgccacccattctacactggacgtcaaaaattcgcttctgctgatggtcgtgttgatcgctttaacaaaaaatacggtcttaagtaataatagattttacaggcaggcaagaattgcttcttgcctgttttttatgtccataaacaggaaaaaaaggggagcggatagcctatgtacataatgaagcaaagcggatggcttgagctgatatgcggcagcatgttctctgggaaatcagaagagctgatccgcagagtgaaaagagcgacatatgcgaagcaggaggtcaaggtattcaaacctgccattgataatcgctacagtgaggaggccgtcgtttctcacaacggtacatccatgacaagccacgtcatctcgtcttcggctgaaatatgggatcatatcagtgaaagcacggacgtcatcgcggtagatgaggtgcagtttttcggcgaatcgatcatcggcgacttatcctcgcttgcggataaaggctatcgtgtcatcgcggccggacttgatatggatttccggggagagcctttcggcgtggtgccgaatctgatggcggttgccgaatcggtgacgaagctgcaggcggtctgctccgtttgcgggtcgccggcaagccgtacgcagcgtttgattgacgggaagcccgcttcctatgatgatccggtcattttagtcggcgcgtcggagtcatacgaagcgagatgcagacatcatcacgaagtgccgaaaaaaacagactgataaataacccttttcatgaaaacatcggtaaaaactccggtgtttttttgacgttttttcaaaaattgtagttaaataacttaaaaaagagtatgaaaaaattaagtaattttcatctcttgaattttcatttttacaggcataaaatgactaagtaatgtaaatagttatgagacattgttcgaataattgtcaaaaaaagatatagcagatcgcgatcacactagccaaaatgggtaattacttaactttgttaactatttgaagaaagaaggagattttcttgaataatattaaagtaacgaaggaaggcaacttagaaactactttaagaggaaaagaagttctatctatccctactttaaataaaggtgttgcgttttcagcagaagaaagaaaaagccttggattagacgggctgcttcctccgacaattctgtctcttgatgagcaggcaaaacgcgcatacgagcagtttcaagctcagccggaccgccttcgccaaaacgtgtatttgaatgatttgcaaaaccgtaacgaagttcttttctttaaattgcttcaaaaccatcttcgtgaaatgctgccggttgtttacacaccgactgtcggtgaagcgattcaagaatacagccatgagtacagaagacctcaagggatttacctttctatcgacaacgtggaagggattgaagaggcatttgaaaaccttcatgccactgccggagatattgatctgatcgttgcgacagactcagaaagcatcctcggaatcggtgactggggtgtaggcggtatcaacatcgccatcggtaaattagcggtatacacagctgccgccggtattgacccaagccgtgttattcctgtcgttcttgacgtcggtacgaacaatgaaaaacttctgaacgatcctttatacatcggtaaccgccatgaacgtatccaaggcgaacgttacgaagctttcgttgacgcttatgtaaaagctgcgcttaaatatttccctaaagctcttcttcactgggaagaccttggaaacaaaaacgcgcgcaatatcatgaagaaatacaaccatgaaattcttacattcaacgatgacattcaaggaacaggcgcgattacgcttgcaggtgtgcttgcggctatgaagaaaacaggcgcgtctattaaagaccagcgtgtggttgtcttcggtgcgggatctgccggaatcggaatcgctgaccaaatccgcgacactatggtgcttgccggtctttctgaagaagaagccaacaaagcgttctacacaatggactacagaggcttgttaattgaaggtatggaaaacattcttgatttccaagagccgtacctgcgcacagctgaagaaattaaagattggaaacgcgatgaaaacggacaaattcctttcattgaagtgatccgtcaagcgaaaccgacaatcttaatcggtacatcaggccaaagcggcgcgttcagtgaagaaatcgtcaaagaaatggcaaaacacgttgagcgtccggtcatcatgccgatgtctaacccgacaccgcttgctgaagccgttcctagcgatcttttcaaatggactgacggcaaagtgcttgtggcgacaggaagcccgtttgacaatgtagagtacaatggcgtttctcatgaaatcggacaatctaacaacgcattcgcgttccctggacttggtctcggttcaatcgttgtagaagcgaaagtgattactcctgcaatgtttgcggcaactgctgacgcaatcgcagaaagcgttgattttgaaacaccgggtgcaggccttctgccgagcatgagcgacttacaagaagtttcaattaaagttgcgatcgccgtagcggaaactgccattaaagaaggcgtggcaaaccgcattcctgaaaatgtagaacaagccgttcttgatgcaatgtggaaaccgcaatataaacaagttgtcgctaaataatttttacgattaattttacagtccgagggaaagcttttatgtaaaggctaaagtatacggacattaaggatttggaggagaacattttgagcttcttagatattttaatcctcctggcgccgatctttttcgtgatcgtgctgggatggttcgcaggtcgcttcggaagttatgacgcgaagtcagcaaaaggggtaagcaccttagttacgaagtacgcgcttccggcgcattttatcgctagtattttaaccacttcaagaagtgcgtttttatcacaggttcctttgatggtcgctttgatcattgggattgtcggattctttatcgtcattctgttggtttgcaaatttatctttaagtatgatttaacgaattcatctgtattttctttaaactctgcacagccgacttttgcttttatgggtattcccgtactaggaagcttattcggagcaagcgaagtagcgattcctatcgccgttacgggtatcgtggttaacgccatccttgacccgcttgcgatcattatcgctactgtcggtgagtcatctaagaaaaaagacactgaaaacgagaacttctggaaaatgactggtaagtctattcttcacggtctttccgaaccgcttgcggctgcaccgcttatcagtatcattctggtactctgcggtgtaacactccctggcttgggagaaaaaatgcttgatcagctcggaagcacaacatcaggtgttgcgctcttcgccgtcggtgtaactgtcggtatccgcaacattaagctcagtctgccggctttcggtatcgctttgttaaaagttgccgttcagcctgcgctgatgtacttgatcgctcttgcagtcggacttccggctgaccagatcactaaagcggtattgctcgttgcattccctggatctgcggtagcggcgatgattgccacacgtttcgaaaaacaagaggaagaaactgcgtccgcgttcgtgatcagtgcgattttatctctcatctcactgccgatcatcattgcgctgactgcataatgaaaagctccctgtttcagggagcttttttgattagaattgaaatttaaaaggcgaaaatctcgttttttttctgggtttcttatgttctgaagaagcggctgtttctgagaggggagctgtctgggcaagttcctggatgcgggaggccaatgtctgcaattcggtattgaggtcgtcaatttcccgcctgtgctgaagaagctgataagacaccccttcatccgccttttgtttcagctggcgttcaagctcctctatccttgaaagcagatggttctcaccttgtttctctttcgtgagaatgtccagtttgcgctccagctctgccaatctttgttcagcgccgccattgattttcggacgctgcaaaatgaagcccgtccgttttttcggctgccggggcacttgaacgtccagaagggcagtgccttcagaaatttgccgtttgaccgatttcagcacatcaagatcctcaggtgtaaaggaataatgtccgagctcattccgttcagccggaagattcagctgtttgacccacctttgcaccgtttttgcggagacgccgagctctttcgcggccatgtttgtattcatgatcacatacctcctttttgctaggtattcgaccatgaggcggcgttcccttcatgttagacaaaacaagaaggaattcgccaaagaaagcggcatttcttcaaaaaacttacgcttcatacaattcaagcggaagcttgtcgggatcaaagaaaaaggtaaaccgtttccccgtcagcggatcggttctgattggttctgtgccgacgcccttttcctttaactctctgacggctgcttcaagatcgtttacggtgaaagcgagatgccggagacccgcggcttccggtctggtcggccgttcgggcggatcgggaaaggaaaacaattcaatcgcgtacgcgccgtccagcgcaagatcaagtttataagattcccgttcctttcggtatgtttcttttataatgccgaagccgagaatctcggtgtaaaaagctttcgacttttcataatcagagcatatgattgctatatggtggatggatttcagcatatccgctcctccttttttgcttcagtataacagaggcgaattgcttttgactggcgataagccctatactataatgagaatgttacgcacaggaaaacagaggtgaagaccgtgttagaccgtttacagtcaattgaacaacgatacgaaaaattaaatgagcttttaagtgatccggaagtggtcaacgatccgaaaaagcttagagaatattcgaaagagcaatctgatatacaagaaaccgttgaagtctatagacaatacagagacgcatcagaacagcttgccgatgcgaaagcgatgcttgaggaaaagcttgatgccgatatgagagaaatggtgaaggaagaaatctccgaactgcagggagagacggaaaccttatcagagcgtttgaaagtgctcctcatcccgaaagacccgaacgatgataaaaacgtaatcatggagatccgcggagcagcgggaggagaagaagccgcgctgtttgcgggaaatctctacagaatgtactcccgttacgccgaaatccaaggctggaagactgaagtcatggaagcaaacgtgaccggaacgggcggttataaagaaatcatctttatgattacgggaaaaggcgcatactccaagctgaagtatgaaaatggcgcgcaccgcgtacagcgtgttccggaaacggaatcaggcggccgtattcatacatccacggcgacggtggcgtgtcttcctgaagcggaagaagtagaagtggacattcacgaaaaagacatccgcgtcgatacattcgcatcaagcggaccgggcggacaaagcgtaaacacgacgatgtcggccgtacgcctgacgcatttaccgaccggtgtcgtcgtttcctgtcaggatgaaaaatctcagattaaaaacaaagaaaaagcgatgaaggtgctccgcgccagaatctatgacaaattccagcaggaagctcaggctgaatatgatcagacccgtaaatcagccgtcggttcaggcgaccgttccgagcgtatccgcacatacaatttcccgcaaaaccgtgtgacggatcaccgcatcggcctgacgattcaaaagctggatcaaatcctggaaggcaagcttgacgaagtggttgaagcgttaatcgtagaagaccagtcaagcaagctccagcaggcggaaaattaagatgaagaccgtttttgaagccctaagctgggcttcttcttatttaaccgaagcgggaagagaaaaaaacgcggccgagctgctgttgttaaatgataccggaatggaccggagcaagcttctcgcaagtctgcaggaggccgtcggcgaggacgagctttatcgattcaggcggcacgtggagatgcataaagaaggtattccgattcaatatattatcgggaaagaacagttttacggcagggaattttttgtgaatgacgatgttctcattccgcgtccggaaacggaagaagtcgtctttcatctgctggacagacagaagcgggcattttccgaggcagaacgactgaacgtcattgatatcggtacggggagcggagccattgcggtgacgctcgcgctggaatgcggacatttttcagtatcggcttcggatatttcaaaagaagcgctgcaggtggcggaaagaaatgcgcaaaacctcggagcggacgtctgttttttgcagggagatctgttaactccttttatttcatcagggaaaaaagcggatattattgtttccaatccgccgtatatttctgaagaagaaatggcggatttgtcggatatcgtccgtttccatgagccgcttcatgctcttacggacggcggtgacggtttgaaattctacaagcggtttatggaggagctgcctcttgtcatgaaagataaagcgcttgtcgtctttgaaatcggatataatcaggggaaagccgtgaaagacctgttccgtcattcctttccgaatgcggaagtggaagtcgtacaggacatcaacggaaaagacagaaccgtatccgcggtcatcacatcatgaaaaaagcccgccggtgacgcacacggcgggcttttgttacaatggaaagaaaatgaaaggggcatccgccttgaaaaaagcgttcgccttcggatgtatactcgccgccgcagcttatgcggcgggggttgttctgccgtttggtgttgacatcattttcggcgccgttacggctgttcttatcgtcacagcgattatcgtttccgggttggccgtaagcggagcggagcagcgggccaattatcattctgaaacagaagaaggacggcacgcccgtttaaagatggccgccgttttcttttgcgccgctctcccttcagccggctgtctgctgattacgcttctgtagccggattttgtctttgcagcaatacggaatcccatacccaatagacgacggctgttaaaaccgcaaagatataaaaggctgaattagaaaacagagattggcctgacggctgcaaaagaccgaagatgatcccgtttgcaatgaatgacacccctaaataataaagaaaatacagcggatgaaatctcttcggctttttattcagaaagtattgaagcggcagcgcaaaaatcaaataaggaaacaaaaaataaaacgccatcgaaatgaaagccgcgataatgaattgatgaacatacaaaatagaataaatgacagacatacatgccgccgacagcagcacggtgtaattatatttcatctgaaaacctcctatcaaaataatatcgtaccatattttgaatctgtcaatgcagattatcagcttgctagatttttttcttcccgccggtttaaaccttttccgtcatgtccataatgggactagataaaaaaagcacggagaggaacggtggggaccgatgaaacagacaatgatgatctgcatatatatttttcttttattatcaggagcgcttgcgggtttgacaaaagaagaaacggcgcgggcatcagccgatgagcccgtcgtcataccggatgaagcgatccggctcagaattttggccaacagtgataacgatgaagatcaaaagctcaagcgccagatcagagatgctgtaaacaagcaaatcacggactgggtgaaagatatcacttccattgaagaagcgcggcggctcattcgttcgaagcttcctgaaattaaagaaatcgccaaacaaacgatgaaagaaaagggtgcgcatcagtccgtttcagttcaattcaataaaatctcgtttccgacaaagctctacggcaatatggtctatccggccggaaaatatgaagcgattttaattacactcggcaatggcgagggcgccaactggtggtgcgtcttgtttccgccgctgtgcttccttgatttctcaaacggcgaagcggtgaaagatcaggaagacggcggacagaagcaggaagaaacgcagaaacagactaaaaaagtgctggatgacgtaaaagcaaaggctgataaagcgaagaaagaaaataaagatgacgatgatacagaagtgaagtttttcctcgtcgattggatttcagatctattttcctgaagtaaaaggcataaatccggattcgattcatagattggaagaaagagttgatcgaaacggagggaaatatatgttttatcagctgagagtggcaagagatcaagatacggaggcgctggaggcctttttgaaaaaggctgatacggcacatgcggaaatcgatcagcagatcagccggtttatcgtactggaagacagcgaaaaaatgattgccgcctgtctcgggatcgaaaaattcagcggcggaaaagggcttctccgttcactcgtcatgtcggacaggctgaatcaaagccatatcgttacactgtttcaaagtatggatgtgctgtgcaaaaaacatgagattcaagatgtctacttagtcgccaatcagccctcatctgctgagtttctgaatgtgatgggatttgaagcgtgcgccgatgcgcctgatgaactgtatacgtccgaacatttccgcaactcgttatgcacagaaggttcgtttttaatggtgaaaacctctgcctgatctaacttatacacaaggttatccacttattaaaaagtgttgtccacagtttgtggataacacttgttttattaaaggacatcttttatactttcaaaaggaatacacgagagaaaataaagttttaccgctttaaaataaggagtttggttctacatgaaaacaagaagatggtttgtggattgttccgcagaattatccacaaccgatccccagattacacaagccgcggaattgctgcggcagaatgaggttgtggcttttccgacagaaaccgtttacggactgggcgctaacgctgaaaatacggaagccgtaacgaaaatatatgaggcgaaaggaaggccgagcgataacccgctgattgtgcatatatcccatatcagccagcttgatcgttttatcagccatattcctgagacggcgaaaaagcttatgaagctattctggccgggggcgctgacccttgttctgccgtgtaagcccggtgtgctgtcaccccgtgtcaccgcgggacttgagacggtagcggtcagaatgcctgatcatccggtagcattagccctcatcagctcggccggactgccgatcgccgcgccgagcgccaatttatcaggaaaaccgagcccgacgaaggccgagcatgtagctcatgatttaaacggccgcattgccggtattgtggacggcggcgccacgggaatcggagtggaatcaaccgttctgtcctgtacggggaaacagcccgtgctgcttcgtccgggcggcgtgacaaaagagcagattgaatccgccgccggttcggttcttgtggataaagggctgaccgaagaagatgaggttcctatttctcccggtatgaaatatacacattacgcgccttctgcgccgatggctattgccgacggcggcgcccggagaattcaagaactggcagacgcatataaaagccgggggaaacgaatcggcattttgacaacagaagagaacgccgatagttaccaggctgattatatcaaggtctgcggcagacgcgccgaccttgaaacagtggcgtccgccttatacgatgcgctccgcagctttgatgaagcggaagtggacatgattatttctgagtcctttccggataccggagtggggctcgccgtgatgaacaggctgatgaaagccgcaggcggcaccgttatccattaacttgttctaccccttatcggacatgcataagctaaacaagcgggcacgtccaagggggtttttatttcatgtcgaatctattcatcggggaacttgtctccttaagcatcatggcatttgctttagggacggatgccttttccgtcgggctcggaatgggaatgattcagctgaagaaaaaacaaatttttcatataggggttgtcatcgggctgtttcatgtcatgatgccgcttgcgggaatggcggccgggcatctgctgtccggttttctggggatgctcgccgtttacatcggcggatctcttcttttcattttaggggtgcagatgatcatcgccgcgtttaaacaatcagacgggccgctcatatctccggcaggctcgggactgttgctgtttgcggtcggtgtcagtctggacagcttttctgtcgggctcagtctcgggatgaacggttccaatccgtttctggccgttacgctgttcggggttttcagcaccgttttaacatgggcgggccttttggcgggaagaaaggtgcagtcgtggctcggctcgtacagcgaagcgctcggcggagccattttgatcggattcgggctgaaactgcttttaccggtataagatacgtaaaaaaagaaacgaagatgccgtttcttttttcttcatttataataggcagtaagaggtgacggacatgaaaataatctttgtatgtacaggcaatacgtgccgcagtcctatggctgaggctctttttaaatccattgcagaaacgaaagggctggacgtcagcgtaagctcggccggcgtattcgcgtctccgaacggaaaagcgtcagcccatgccgtggaagcgctgtttgaaaaacggatcgctctcaatcacagttcatctcccttatcggaagaacatatcgagacggctgatctggtgctggcgatgacggaacagcacaaacagctgattgaaggccgatatcaaaacagtcagggcaaagtctttaccattaaagaatacgtaacgggggaaaacggcgatatctctgacccgttcggcggtccgcttgatgtttataaacagacgcgggacgaactggaggagctgctgacccttttgactgatcaattgcttgacggaaaaagcaagtaatctgtcagaaaatctgcaaacaggtcatttgcaaaacgaatgtgaaagagtagaatgaaatcaacggatttcgtaataaaaaggacaagcacactgggctgtcttcgcccagccacacctaggaggtaaatgaatgaaagtagctattgcgtcagatcacggcggcatccatatccgcgaagaaataaaaagtcttttggatgaattgcagattgaatacattgatatgggctgtgaatgcggcgccggctctgtcgattattcagactacgcttttccggtagcggaaaaagtggtgaacggcgaagctgacaggggaattttaatttgcggcacaggcatcggcatgagcatctccgcaaataaggtaaagggcatacgctgtgcgcttgcccatgacaccttcagcgcaaaagcgacgcgtgaacacaatgacacgaatgttcttgcgatgggcgaacgcgtcatcggcccggggctggcgcgcgaaatcgcaaaagtctggctgacgactgaatttacgggcggccgccacgaacggcggatcggcaaaatcgcagattacgaagaaaaaaatctgtaagaggtgctggacaatggaagagatgaagcaaaaatggacggacatgctgactgagtttcaagagcaggcaggactgacggaaggcagtctgctggtgatcgggtgcagtacaagtgaagccgccggaagccggatcggcaccgccggaagcggggattgggctgaattgatatacggcggacttaaccggtttaaggaaaaaacgggtgtgcatcttgcttttcaatgctgcgagcatttaaacagggcgcttgtcattgaagcggaaacggccgagcggttcaagctccccattgtttcagccgtccccgtcccgaaagcgggcggagcgatggcctcttatgcataccggcagatgcgttctcccgtgctcgctgaatcgattcaggctgacgccgggattgacatcggtgatacgttcatcggcatgcatctgaaacccgttgccgtccctgtccggatatcaagccgtgagcttggagaagcacatgtgacgatggcccggacaaggccgaagctgataggcggaattcgcgccgtttatgaatgcgaatgatgaaaatacttttcctgtataatgttcgtgttttctaattaaattttgtgatttttttaaataagctgttacattcacctgaaaaaccatgtacaataagggtggtaaaaataaagaacaggaaacggataggagaggatctcgctgatgaaacatttacctgtacaagacaaacaagtgtttaacgccatcaaagatgagcgtaagcgtcaacagactaagatcgaattaattgcttctgaaaacttcgtgacggaagcggtaatggaagcgcaaggctctgttttaacaaacaaatatgctgaaggctaccccggcaaacgctactacggcggctgtgagcatgttgatgtcgttgaggacatcgcccgcgaccgcgcgaaagagattttcggagctgagcatgtaaacgttcagccgcactcaggcgctcaagcgaacatggctgtttacttcacgattttagagcacggcgacacggtgctcgggatgaacctctcccacggcggccacttaacacacggaagcccggttaatttcagcggcgttcaatacaactttgtagaatacggagtcgataaagacacgcaatatatagattatgaagatgtgcgtgaaaaagcgctggcgcataagccgaaactcatcgttgccggagcgagcgcgtacccccgcacgatcgactttaaaaaattccgcgaaatcgctgatgaagtcggcgcttacttcatggtagacatggcgcatatcgcgggtcttgtcgcagccggtcttcatccgaatccggttccttacgctgactttgtaacgacaacgactcacaaaacacttcgcggaccccgcggaggaatgatcctttgccgtgaagagttcggcaaaaagattgataaatccattttcccgggaatccaaggcggaccgcttatgcatgtcatcgcggccaaagccgtttctttcggagaagtgcttgaagatgatttcaaaacatatgcgcaaaacgtcatctcgaacgcgaagcgcctggctgagtctctgaacaaagagggcattcagctcgtatcaggcggaacggataaccaccttgtgcttgtcgacctccgttctctcggactgaccggaaaagtcgctgaacacgttcttgatgaaatcggcattacatctaataaaaacgcgatcccttacgatccggaaaaaccgttcgtcacaagcggaatccgtctcggtacggcagctgtgacaagccgcggctttgacggtgacgcgcttgaagaagtcggcgccatcatcggcctcgcgctgaaacatcatgaagacgaagcaaaacttgaagaagcgagacagcgcgtatctgccttgactgaaaagtttcctttatataaagaactaggctattaataaggaagaaacccgccggaaccttaatccggcgggtttttttatgattttcttgaaactgtttgtctttttctgtagaatcaatagaagtgtgaaaaagtcactcggacaacaaaaaaggagctgaacacagtatgggaaaggtttacgtatttgatcatcctttaatccagcataagctgacatatattcggaatgaaaatacaggcacaaaggatttcagagaccttgtggacgaagtcgcgtcactgatggcgtttgaaattacacgtgatcttcctcttaaagaagtggaagtgaaaacacctgttcaaacagcgacttccaaagtgatttcagggaagaaactcggtatcgtgccgatcctgagagcgggtctcggaatggttgacggcatgctgaaattaatcccggccgctaaagtgggacatgtcggattataccgtgatccggaaaccttaaaaccggtggaatactatgtcaagcttccttctgatgtagaagaacgcgaatttattgtcgtggatccgatgcttgctacgggaggttctgcggtggaagcgataaacagcctgaaaaagcgcggcgcgagaaacattcgttttatgtgtcttgtagcggctccggaaggcgtggaagagctgcagaaacatcattctgacgttgatatttacatcgcagcccttgatgaaaaactgaatgaaaaaggctatatcgttccgggcctcggtgacgcgggtgacagactgtacggaaccaaataaatcggaaaacctcattcagggggttttctttttttatccagatatttgctgaatgggcagacttcatacatttataggtgaatttgtgaacattctgtgtatgctttcggtataaaaagttttttaactttaaacagattgacacatgttaggggctattgtatgctaaacgagggtattatgagaaggttttcattcctttcatttctagtatccatcctcattttaaatcctccaaaaaacccgttatatgaggatttatctaagcgaatgaaacagcatcccgtggcatcaggaggatgagtggttttttcgaacaggccgttttgcggacaaaaaaggccttctgcaagggttaaccgcatgttttgccgtatccaggaattatattacattttcatcaggagacagatagttgatggacgatcccaatcttacattcagcagacaacggagatatgtatttgtaatcttagcaatctatttgctgggatatggtcttacggcgtataaaactgtttttttaggcctctttttgggaactgttttcagtttgtttaatttgtggctcttgaccagaagaatgaatgcttttgacaaggccgtggcgaaaggaaagtccatacgatcactcgggagcgcagcgcgttggtgcaatgcgatacttgcgatggctgtcgcctttaaatatcccgataaagtcagtgtggcaagtgtgattattggattaatgacaatttatcccgtcattatgatagattccattattcagctcaaacgttcatcaatggaagagaggtgaaaacccattgaatcacgattacagaactattgatttgtttggtcttacttttaatctgacaaacattctgatgattactgtggcaagtgtgattgtgctgctgattgcgattctcactacgagaacgctgtccatccgtccgggaaaagcccagaacttcatggaatggattgttgattttgtccgcaatattataggcagtacaatggatttaaaaacaggggctaacttcttggcgcttggtgtaaccttgctgatgtacatatttgtatcaaatatgctagggctgccgttttctgtaacggtcggacacgagctttggtggaaatcaccgacggccgatccggctattactctgactctagccgttatggttgtgtcgttaacgcactattacggcgtgaagatgaaaggtttgaaggaatattctaaggattacctcagaccggttccgcttatgttcccgatgaagatcattgaggagtttgcgaatacgctgacactcggacttcgtctttacggtaacattttcgccggggaaattcttcttggcctgcttgcgaatctggcgacgaatttctactcaaacagtttctttctcggtttggtcggcacagtcggagccattattccgatgcttgcatggcaggcattcagcttgttcatcggtaccatccaggcatttatctttacgatgctgacgatggtgtacatgtcacacaaaatcagtcatgatcattaaaatcatatatccattcggataacattttaaaggaggaactttttcatgaatttaatagcagctgcaattgcaatcggtttaggtgcacttggtgcaggtattggtaacggtctgatcgtttcacgtacggtagagggaatcgcccgtcagccggaagcaggaaaagaacttagaactcttatgttcatgggtatcgcattggttgaggcccttccgattatcgctgtcgttatcgcgttcttagcgttctttggctaagcaaaaaagccttatatgaactaaaaatggcgaagatcactctaagagaaccttcgccattgctttatgtctgataagcaggccgtcccaaaacggctttttatcagcagagaaaacctgcagaagggagttgccgtagtagatgtctcaattacctcttgaattaggactgtcgtttaacggcggagatatcctattccaattgttagctatgctagttttattagcgcttctcaagaaattcgctcttggaccgctattaaatataatgaaacagcgtgaagatcatatcgccggcgaaattacgtccgctgaagaaagaaataaagaagcgcagaagctgattgaagagcagcgcgttcttttaaaagaagcgaaacaggaatcacaatcactcattgaaaatgcgaaaaaactgggtgaaaagcagaaggaagacattatccaggctgcacgcgccgagtctgaaagattgaaagaagcggcgagaaccgaaattgtcaaagaaaaagaacaagcggtttccgcacttcgcgagcaagtcgcatcactttctgtcttaatcgcatcgaaagtgattgaaaaagagcttgatgaacaagcccaggaacaactgattcaggactatcttaaagaggtaggagaaagccgatgagtggatctgctgtctctaaacgatacgcgtcagcgcttttcgacattgccgttgagacttctcaaatcaatgaaatcgaagaagagcttaccgtactaaaagaagtgttccggaacgaagccggattacaggaagtgttaagccatccgaaggtatcggccgctaagaaaaaagagctgattcagcaatcgttcggcgcactgtctgagtctgtgctgcatacgatttttcttctgattgaccgccgccggtcttcgattgtgcctgatctcacagacgagtttatcaaacttgccaatcaggcccgtcagacagaggacgcggttgtttattcagtaaaaccgctgtcagaagcggaaatgttatcattgtctcaagtgtttgcaaaaaaagccggaatcgcttcgctcagaatcagaaatgaagtgcagacggatttaataggcggcattaaagtccgcattggaaaccggatttatgacggaagcgtaagcggaaagcttgagcgcatggaacgtcaacttgccggaggaaatcgatagaaggggtgaaacctaagtgagcatcaaagctgaagagattagcacgctgataaagcagcaaattcaaaattaccaatctgaaattgaagttcatgacgtaggtacagtcatccaagtcggagacggtattgcgcgtgtgcacggccttgacaattgtatggccggtgaacttgttgagttttcaaacggcgttttgggtatggctcaaaaccttgaagaatccaacgtaggtatcgttatcttaggaccttacagagatatccgtgaaggtgatgaggtcaaaagaacgggccgcatcatggaagttcctgtaggtgaagaattaatcggacgtatcgtcaacccgctcggacagccggtagacggactgggtccgattctgacaagcaaaacacgtccgatcgaaagccaggctccaggcgtaatggaccgtaaatcggtacatgagccgctgcaaacgggtatcaaagcgatcgacgcgttaattccgatcggccgcggacagcgtgagctgattatcggtgaccgtcagacaggtaaaacatctgttgcgattgatacaatcttaaaccaaaaagatcaagacatgatctgtgtgtacgtagcgatcggtcaaaaagaatctacagtgcgcggcgtggtggaaacacttcgtaagcatggcgcgcttgattacacgattgtcgtgacagcgtccgcttcacagccggctccgcttctgtaccttgcaccgtatgcaggggtgacaatgggtgaagaattcatgtacaacggcaagcacgttctcgtcgtatatgatgatttatccaaacaagcggccgcttaccgtgagctgtcattgcttcttcgccgtccgccgggccgtgaagcattccccggggatgtattctatcttcactcccgtctgcttgagcgcgcagccaagctgagtgacgcaaaaggcgcaggatcaattacggcgctgccgttcgtcgaaacacaagcaggagatatctccgcttatatcccgacaaacgtcatttccattactgacggacagattttccttcaatccgacctattcttctcaggcgtgcgtcctgcgatcaatgccggattatccgtatcccgtgtcggcggatcagcccaaatcaaagcgatgaaaaaggtagcgggaacattgcgtcttgacctggcttcataccgtgaacttgaagcgttcgcccaattcggatctgatcttgaccaggcgactcaggcgaaactgaaccgcggtgcgcgtacagttgaagtgctgaagcaagacttgaataaaccgcttccggttgaaaaacaggtagccattctttatgcgctgacaaaaggatatcttgatgatattccggttgcggatatcagacgttttgaagaagagtactacatgtaccttgatcaaaaccataaagatctgcttgacggcattgcgaaaacaggaaaccttcctgctgatgaagacttcaaagctgcaatcgaaggtttcaaacgcacatttgcaccaagcaactaacccttagaagatgagagaaaaaggttctctttttctctctttttacgcaaatgaagaataaaggtggtgaaatctttggcctcattacgcgatattaagtcaaggatcacgtcaacgaaaaaaacaagccagattacaaaagccatgcagatggtatccgctgcgaagctgaaccgtgcggaaaccaacgcgaagtcatttgctccgtatatggataagatccaggaggttgtgtttaacgtcggaaaaggcgcgaaaaacgcgaaacacccgatgcttgtctcaagagaagtgaaaaagacggcgtatctcgtcattacgtctgaccgcgggcttgcgggtgcgtttaacagttcggttttgcgaaacgcttaccgcaccattcaagaacgccatcagtctaaagatgaatacacggtgattgcaatcggcagagtcggccgcgatttcttcaaaaaacgggaaatgccgattttgtctgagttagtggggcttggcgacgaggtcacttttgctcagattaaagatttgacccgtcagacggtacaaatgtttatcgacggcgcttttgatgaactgcatttggtgtataaccatttcgtcagtgcgatttcacaggaagtgacggagaaaaaagtgctgcctttaacggatttcggaacgagcggcgggaagcgcacggcttcatacgagttcgaaccggatgaagaagaggtgctcgaagtgctgcttcctcaatatgcggaaagcttaatttacggcgcgcttcttgacagtaaagcaagtgaacacgctgcgagaatgacagcaatgaaaaatgcgactgataatgcgaaagaactcattgattcactttcgctttcatataaccgcgcgcgtcaagcggcgattacacaagaaattaccgaaattgtcggcggtgcagccgctttagaatagaaagattttgtcaggagggatagcgatgaagaaaggacgcgtaagtcaggtgcttggaccggttgtcgacgtacgtttcgaggacggccacttgcctgcgatttataatgcgattaaagtttcacagccagctacaggcgaaaatgaagtaggcatcgacctaacgctagaggttgctcttcatttaggcgatgatacagtccgtacaattgccatggcatctacggacggaattcagcgcggaatggaagctgttgatacaggtgcgccaatttccgttcctgtcggtgatgtgactctcggacgcgtatttaacgtactgggagataaaattgatttaaatgaaccgctgcctgcggatgctcaaaaggacccgatccacagatcagctccttcattcgatgagctttcaactgaggttgaaattcttgaaacgggaattaaggttgttgacctgctcgctccttacatcaagggcggtaaaatcggattgttcggcggcgccggcgtaggtaaaaccgtattaatccaggaattaatcaacaacatcgcgcaagagcacggcggtatttccgtattcgccggtgtaggagagcgtactcgtgaagggaacgaccttttctacgaaatgagcgattcaggcgttatcaagaaaacagccatggttttcggacaaatgaacgagccgccgggcgcacgtatgcgtgtagcattgacgggtcttacaatggctgagcatttccgtgataaacaaggacaggacgtactgttctttatcgataacattttccgtttcacacaagcgggttcagaggtttccgcgcttctcggccgtatgccttctgcggttggttatcagccgacgcttgcgacagaaatgggtcagcttcaagagcgtattacgtctacaaacgttggttcagttacatctatccaggcgatctacgtgcctgccgatgactatactgacccggctccggcgacaacgttcgctcacttggatgcgacgactaaccttgagcgtaaattaactgaaatgggtatctaccctgcggttgatccgctggcttccacttcccgcgcgcttgctccggaaattgtcggagaagagcattatgcggtggcgcgtgaagtccagtcaacgcttcagcgttacaaagaacttcaggatattatcgcgattctcggtatggacgaattaggtgaagaagacaagcttgtcgttcaccgcgcacgccgtatccagttcttcctttctcaaaacttccacgtagctgagcagtttacgggacaaaagggttcttacgtgcctgttaaagaaacggtacgaggctttaaagaaatcctttccggtaaatatgaccatcttccggaagatgcattccgtcttgtgggacgcattgaagaagtcattgagaatgcaaaagagatgggtgtagaagtttaatctggtcctaggagggtaaaagcatgaagaccgttaaagtcaatatcgttactcccgacggcccagtatatgatgctgatattgaaatggtaagtgtaagagccgagagcggtgatctcggtatcttgcctggccatattccgaccgtggctccgcttaaaatcggcgctgtccgccttaaaaaagacggacagaccgaattggcggctgtcagcggcggatttttagaagtccgtcctgatcaggtcactatccttgcacaagccgctgaaacagcggaaagcattgataaagagcgcgcccttgctgcgaaaaagcgggcggaagaccgtttgaacaaacgatcagatgatactgacattcgtcgggctgagcttgcgctacagcgggctgtaaacagattggatgttgcaggaaactaaaaaagaatccttctcggctgtctgagaaggattctttttctatattaacgcataagagattcatagacgccgataagcggatgatcctcttctttttgcagatataaatgttcgcagcagttgtcggtgtgccacgttttgtttcctctccgcacacccgtcgtataagcgccgtccgtatacggataaggtttgacgacccattcggcatcgtcatggtgtctgatggcgcaatcgatgacatacacactgagcattttctcaaattcgtcaatcggcaggttccaatccgccaaaagcagctcttgtatgctgcggaagtaaagagcttccacttccagcaggctgccgcgtgaataatcaagagaaatgttgaaaaactgacataattctttcagttcctctgtttgagactgtctataatcatagtagaatgctatcgcttcccactcgtggtcaaatacgggaagagtttctccatactgcttttccggatgaaaaaaggaatgattcatattcccatctcctttccaaaaaagtatatcatgccggagaacggacatttaagcggggattgcccctaattttggataaaaattctgatgtaaaaatgatcatctttctctcttcttcttatataataagagaggatatgaggggcggaaaaaatgaaaggagatggaatttgtgaatgtattggggcagcaggccgcaatcagcatcctggttcacctggtatgcattgcggtgacatggtgggcgcttcaggccgtcaactttgatccgctgatccgaaaaggaaaaatagtgcaggcgaggctgctgatcattcttcttaccattgcgatcggtacggcagtcgctgacttctttttagattatcttacctattcgaaacagcttccatacttattttaagatgtttcgtctgttgaaatgaagggaatcgctgggtgagaaaccaatttttcttcacccgcttggcgagttttgacgaagttttccatgtattgctttccccggctccggcaaaaatgggagtaagggggagagatcgatatgaagaaaaaaagagcaggccgcatcatcttattttttgtttttttaagcgccttaatagcggtatttcattccattcatgcaagtgagctgtctccgcttgcccagattgccgaaggaatggagcggcagcaggtcactgtagatgaatggacgcttcatgcgaaaaaaaatctgaacctgtcactgagtgaatttgatgacaaggtaaaagaactgaagacgcagtatccgcaatatcattgggaatccgcgcgggaagataaaatcgtaaaggccgtcggcacgtattctgacaaaaaaaatcacacaacttttaaactgcagctcgtcactaccctcaaaaaccagaacccaacttcgtatttattatatgagcaaatgagcccggagcaaccggaaaactggaatgatacatatgaacagtttgaacggcaggcacatgacatatttcaaaataaagtatttatttttacttgtcttaagggtcatttaaatgataatatgagtattgttttgcaaaaaaaagcagaacagctcatgaaagaatttgaagcaagtccagttgaacatgtagttgagcctcatttcgtttctgtttctgcatttacatataagtggacagattacatcatgacatcgaaacataagatgaatgtgcaagttgcgcttagaagtgcgggaatgggcgaaaaacataccgttacggttggcacaccaatcgtgacgactgaatattaatatagagaatatagggacgcggaggggaataccttggaaaaaatcatcgtccgcggcggtcagaagttaaacggcacagtgaaagttgaaggagcaaaaaatgccgttttaccagttatcgctgcatctttattagcaagtgaagaaaaaagcgtaatatgtgatgtacctacgctctccgatgtatatacaattaatgaagtgttgcgtcatttaggagcagatgtgcattttgagaataatgaagttaccgtaaacgcttcttacgctttagaaacagaagcaccttttgaatatgtgcgcaaaatgcgcgcgtcagtgcttgttatgggccctctgttagcccgtacgggtcattcaagagtagcgcttccgggcggctgcgcaatcggctcaagaccgattgatcagcatttaaaaggctttgaagcaatgggtgcaaaaatcaaagtaggcaacggctttattgaagcagaagtagaaggccgtctgcagggcgcaaaaatctatttagatttcccaagtgtgggtgcgacagaaaacttgattatggcagctgctttagctgaaggaacaacaacgcttgaaaacgtggcaaaagagcctgaaatcgttgacttagcgaactatatcaatgcgatgggcggaaaaatccgcggagccggcacaggcaccattaaaattgaaggtgtcgagaagcttcacggcgtaagacacaacatcattcctgaccgtattgaagcgggtactttcatggtggctgcggctatcacggaaggaaatgtattagtcaaaggtgcggtgcctgagcatcttacgtctttaattgcgaagatggaagaaatgggagtcaaaattacggatgaaggagaaggccttcgtgtcatcggtcctgcccagctgaagccgatcgacattaaaacgatgcctcacccaggattcccgactgatatgcagtcgcaaatgatggcgctgcttctccgtgcgagcggaacaagcatgattactgaaactgtgtttgaaaaccgttttatgcatgctgaagaattccgccggatgaatggcgacattaaaattgaaggacgttctgtgatcattaacggtcctgtacagctgcaaggcgcagaagttgccgctacggacctgcgtgcgggcgcggcgctgattcttgcgggattagtggctgaaggtcatacacgcgtcacggaactgaagcacttggatcgcggttatgtgaatttccataaaaaacttgcggctctcggcgctgacatcgagcgtgtcgttgatgaaacggccgctgaacaagaaagcaaagaagtcgtaactgacctaaacgcataatggctgtaaaaacagtatgtcaatctggcatactgtttttttatggtttatcatcattattatgctctgatttccaaaaaagaatacgtttttcgcgtgaaaaatggaataaagattctgtccaaaaggaagtcatattagcttgtccctgcccataagatgaagtagagtcgaatcccaagcaggaggcagctgatatatgaaaccgattgtatttctactatccgggctgtgtatacttattcttctagtccccaccattctcgtccttccgtttcaggcagaaaaaggagcagccgtaaacagagagcccggacacaaaacagcacacaccacacgagaaacaaaaggagcagaaacattgaaagaatcacctgtatccattccggtttatcggacatccaatcattctgtagaaaacattccgcttgaagagtacgtgatcggtgtcgtggcttccgaaatgcccgcagattttaaaccggaggccttaaaagcccaggcgctcgccgcccggacattcatcgtcagactgatggtcgctgactcagccgtccaggcgccgaaaggatcactggtggatgatacgcaaatgttccaagtctatcaaagcaaaagccagctgaaaaaagaatggggttctaagtacgcacacaacctcaagaaaatcacaaacgcggtggccggcacgcaaggaaagattttaacgtacgataacaagccgattgaggcatctttcttctctacgagtaacgggtatacggaaaatgcggaagcctattggacaagcgccattccttatttaaaaagcgtgaaaagtccgtgggataagcaatcgccgaaatatcttgccacccagaccttcagtgtgccggagtttcagcaaaagctcggcgtacagctctcaggacaaaacacggtgggacagattacagccagaacgccgggccatcaagtggcaacggccgtcatcaacggcaaaaagctgaagggaagagacatccgggaaaaactcggactccgttctgccgactttgaatggaaacgaaacggcagcagcatcaccattacgacaaaaggattcggccacggcgtcggcatgagccagtacggggccaattacatggcggagcagggaaaatcagtggcggacatcgtcaagcattattatcagggagtggacatttccgaagcagattcatttttaaacaaatatatggcgaaaaaatagacgctttcatgagcgtctgtttttttgaaaactattccataaacggtaaagcaaccaacagactcatataacgaaagcctaaaggctgacaaatgtcgattgaaggctgagcgccgggtgtaaatcactgataaaaatgccgcttctatgtgaatatacgcaaaaataatgaggaacgccgtcctatttatttcccttttcatctcatttacgataaatattgttcggcgttgaacgtaaatctattgaaaaggggaaaaagcaatgaaaaaaacattttcactcatactcatgctcggattgatgctgactgctgcatctcctgcttttgctgtcgagaatgcaaacgagaagactctttcatttaaaaacaataccgccattttacttgatgcgagcggcagtatggcaaaacggattgacggtgtttctaaatacaacatggcaaaagaagaaattgtccgttttgcggatcaaattaaatctaaatcacaggtcagaatgacggttttcggttcggaaggcaataataaaaactccggaaaggttcaatcttgtgaatccattcgcggtgtgtacggattccaaaggtttgacagacagagcttccttaactctcttaacggaatcgggcctacgggctggacaccgattgcaaaagcattagaggatgcgaaggcttcctttaccggtttgcacaaacttggcagtaaatccgttttcctgttgacggacggcgaggagacatgcggaggagatcctgttaagacagcgaaagaacttcgcaaacagcatattaaagtcaacgtgatcggctttgactttaaggaaggcttcaacggccagcttcacgagattgccaaagcgggcggaggaaaatattacgaagctcacagccaaaaggatatgaaccgcatctttacaatggcagcgagttcattagcggaataagaaaaggtgccgtttatcggcccttttttttatttttatttaacaaaaatttcaagaaaagatgaagagaaaactgtaaaaagaatcagattccggacttatattacaaaaagggcgaaaaaggcattaaatctgtcatcatttatccaatctttttaggatgatgcgcataattctgttcatttttaacggcgtacagccgcttatacaaaaggaatcccgccctatatctttttgcatacacgtcatctagcatagagaagagccgggggcccatcggccaaaaacaaacggagaggaatgaaggaaatgaaaaaaatgttcactgcggggattgtcggacttttgacgctttcactcggatcacctgtttttgcagctgagaaaaagcacgaagaaacaaacgttgctgtgctgtttgatgcaagcggaagcatgatacaaaaaacagggggagagcgtaaaatagatgttgcgaaagagtctgtcacttcttttgcggaagttcttcctgaagacacgaatctgatgcttcgggtattcgggcataagggcaataataaaaactcaggcaaagccgtatcatgtaatgcgacagaaacgttatacggccttcagccgtacgccgtgactccatttgagcaatcactcagcaagattaaaccgaccggctggacaccgatagcgaaagcgctttctgatacgcgtgaagaatttgagcgggccggcgccacagggaaaaacgtcgtatatctgatcacagacggtgaagaaacatgcggcggtaatcctcaggccgaaattcaaaagctccgtaaagcgaacgtcaacacgatcgtcaatatcatcggcttcaacttcggcatgaaaggaagcgaaagccttgaaaaagcggcggaagcgggaggcggcacatatgtctcagctgacagcgcggacgagttcaaacaggcttgggaagacgctgcaaaggatttagcaaaagaataggttaaaaaaggacgcccgcgcggcgtcttttttgtttagaaaacggaaccgcgggaatgatacggataaaaggagatgaacgctgttgttaaaaggagcaggcattatattagtgctggcggcagtcgtttttgttctgatgggaatttttctgaagcttgccgccttcatattcgtcagtatattggccattatcgccgcagttattttattcaccattctgagcagacatcatcgcaatgaaacatagagtcctaagagggctctttttttaaaccgcaaattcgacaaaatacagggattgtggaagaataaaagagaaggatactgcggaggggaaaacagtggatgaaaaaacaacagcggttagagacatataccgctatgaaaaaggggtattaacaaagacggcagatcggatggtttcagagtatccgctgaccgtcatggtgaacggacaggaatttgttacgctcgtctgcacgcctgaccatttagaggaactcgtcatcggatttctcgcatcagaaggcgtcattcgttttgaaaaagaaatcaaaagctttactatagatgaaagtctcgggtttgcatatgttgaactgacgaatcccggagtgcttgagcaaaaagactatacgaagagggtcatcggttcatgctgcgggaaaggccgccatttttactttcagcaggatgtgaaaacggccaaaaccgccgtcagccgtatcactataactcctgagacgtgccttcgcctgatgaaggagatgcaaagaggaagcggcaccttccaggaaacgggcggcgtccataatgcggcgctgtgcgatacggaaaagctgctcttcatgaggacggacatcgggcgccacaacgcgctggataagctgtacggctgctgtttgaaaaacggaatgccggtccgtgacaagctgatcgtcttcagcggccggatttcctcagaggttttattaaaagccgcaaaaatcggcgtgtcgattgtcatttcaaaatcggcgccgacggagctcgcgctgcaaatggcggaagagctgaacataaccgcgataggttttgtcagaaacggatcatttaacgtatacacacatcctgaacgggttgaacaatagaaaggggtcttgggcttatgaatacagaaacgcgccgggtgacagacaaaagggaaaggccgctcagggatcttcgtatctctgtaaccgaccgctgcaacttcagatgcacgtactgtatgccagccgaattattcggaccggattatccatttttacaaaagacggaattgctctccttcgaggagcttgagcggcttgcgaagctgtttgtcggccgcttcggcgttgaaaaaatcaggctgacgggcggagagccgctcatgagaaaagatatgcctgaattgatcaaaaaacttgcgcgcatccccggacttaaagatatcgcgatgacgacaaacggctctctgcttcccgtgtatgcggaaaaactgaagcaggcggggctgcatcgcgtgacagtcagcctcgattctttagaggatgagcggtttaaggccattaacggccgcggggtttcggtgaacaaggtgcttgagggcattgaggcggcaaaagcggccggactcggtgtgaaaatcaatatggttgttcaaaagggcgtcaatgaaaaagatatcctgccgatggcccgctattttaaagaaaagggtcatattctccggtttattgaatttatggatgtaggcaatacgaatcaatggaataaaaaagacgtgatcacgaaggcagagattattgatctgatcaaccagcacatgccgacggagccgatagaagcgaattataaaggagaggtcgcttccaggttccgctatcttgacggttccggcgaaatcggcgtgatttcctccgtctcggatgcattctgcgcctcctgcaacagagcgcgcctgtcggcgagaggcgagctgtttacgtgcctgtttgcgtcaagcggctatgatgttcggaaactcgtgcgcggcggtctgaccgatgatgaattgacggaatccatcgcttctgtctggagaaatcgcacggatcagtattcaattgaccgcgcgctttctaaaacggatgggaaaaagaaagtggaaatgtcttatataggcggatgaagaaaagcctgcccggacaagggcaggcttttttattcacaatatgagagcggtctgttcaaaaaataccgatgacagccgaaatatatgataggaattttgatgcaggacaatcaagttatgcaattccaaagccatacaatatgttaaaatataaccaatagaaattagaaaaggttgtgaaaggggcatgaccgcatacgagattccgtcatctcaagttggagtcaagatcaacaaatggtacaagcacattttagcgtttcaagcggctgatgccataaagctgaaagaggaaattgatgaggatatacaacgtatggaggaagaccagctgctgctgttatattatcagctgatcagctaccgccatcatattatgcttgattacgtcaagccggaatgcaccgaacaatcacagattcagtacagcgagctgcaaaagacgatcgaaagcacggacagcatatcgggactgtctgagtattatttccatttgttcagagggatgtatgaattcgatcacaataactatgttgcggctatttctttttaccggaaagcggaaaaactcctttcatttgtcgaggatgatatagagagggcggaattccatttcaagatgtctgaagtgttttatgtcatgaagcagactcatttttccatgaatcacgggattcaggcgctggatacgtatatgaaacacgatttctacagagtgcggagaattcaatgccatttcgtcatctcaggaaactacatcgactgcaaaaactacgacaaagcgcttgagcatttagacgaagccctccgcctttctttgcttgaaggacagccccgcctgatcgggtcttcgctttacaatctggggaattgttattctgaaaagcgagatctgaatgaagcggcccggtactttagaaaagcggttcccgtttttgaagagcatcagcttgaacagcttccgaaggcgctgttcagcttaacgcacacccttttcaggctgcatgatgaccaagcggcccttacctattatgaaagaggggtcatgattgcgaaagaacggggcgatcgattcagtttagagaagtataagtttttacaagcgctttatttggagtcactcaatatggatttaatccatgaagtgtttgactatatgaatgaaaaatcgctgtatgtgtatattgaagatttcgccttggaggccgccgtttacacaagcgcacatgagcaatataaagaagcggcgtatttttatgaaaaagcgattcgcatgagagaaaacattcaaaaagaacaatgtttatacgatatataattttcttaaccatctgatcagcagatggttattttttttatgcacattataacgtttgaccatagaaaaaaacggaaaaatcgcaaaagagagaaaaaagtatgatgggaaggagggatttgttgttcggattcaatgatatgataaagtttttcgtatcatttctcatcattctgccgatggtgtctgtcatccatgtgtcgggacacagctttatggccatgctgttcggaggcaaggcatcattggatatcggaatggggaaacgtcttttaaaagtagggccgattcaggttcggcgtatctacttcatagattctttctgcaagttcggcgaattgcggatagataaccgtctgacgagcgcgctcgtctattccggaggctgtctgtttaatctcgcttctatctttttaataaatctgctgatcataaaagatgtcctcgagccaaacttatttttttaccaatttgtctatttttcaacttattatgttttctttgcgcttctgccggtgcaatacggggataataagctgtcagacggattggctgtttacaaagtgctccgctacggggaacgctgtgaaatcaataattgagagtttacatgtttgctatcaggctgaaagggaagaaaacaagtacacagaacaaaaaaggagctgaagagatcatgagtcaagataacggtttaaaagacaaagtaaaaggcggcatgaacaaaatgaaaggggaagcaaaggacaaagcaggcgacatggcaaacaagtccgacttaaaagcggaaggtaaaaaagacaaagcgaaaggcagcctgcaaaagggtgtcggcaaaacgaaagataaactcagtgatgattaatttgatagtgaaacacagcaaaagcccaaaatattttgggctttttgttatgagaaatgacaaaaattccagttcatttggttaatattcactaaatttttaaatattctataaattccccggcgatttctttataatattcacatagaatgtaacctttcttcacatttgattaaacgtttgttgaagaaaaaaatgagaaatcggtaatttctgcaaaaggaatcgggccgttcaccgtcgaataacttttatcacttaacatttcatgaggtgaagggggtgacggccgcctgcatcgtttcggtatgaccatgcggattgtgtttgactatcactaagggggaatacagatgaaactgacaccggttgaacaagaaaaattgcttatttttacggcgggagagctcgctaagcagcggaaggcgcgcggcgttctgctgaattatcccgaagccgccgcatatttgacctgttatctgatggaaggcgcgagagacggaaaaagcgttgctgagctgatggaatccggccgcaatgtattgacggaaaaagacgttatggaaggcgttccggaaatgctggacagcattcaggtggaagcgacgttcccggacggggttaagcttgtcaccgttcatcagccgatcaaagcggaggtgaagtcatgaagccgggagcgattcaagtcgcaaaggggatcatcaccattaacgaaggccggaagacgctggaggtgtcagtcaccaataacggaacacggtcagtgcaggtaggatcgcattttcattttgccgaagccaacggcgccctttccttcaatcgggacaaagcaatcggcatgcgccttgatatcccgtcaggcacatctgtccgttttgaaccgggagaagagaaaaccgttacgctcgtggaaatcggagggcgaaaaacggtcagaggtctgaacggcatggccgatacgtatatggatgagcggggaaaagagaagactctgtcaaatcttaaaaaagccggatggatggaggaggcgatccgatgaaaatgtcacgtgagcaatacgcagaactgttcggaccgacaacgggagacaaagtcagactcggagatacggatttatggattgaagtcgaaaaagatttcacgaattacggtgaagaaatgattttcggcggagggaaaacaatccgggacggcatggggcagaacgggcgtatcaccgggaaagacggagcgcttgatctggtcattacaaacgcggttatcctggattataccggaatcgtcaaggcggatatcggggtgaaggacggccggattgtcggcgtcggaaaaagcggcaaccctgatattatggatggggtggacccgcacatgattatcggtgccggaacagaagttatttccggcgaagggaaaatcgtaacggccggcggggtggatacgcatatccactttatctgcccgcagcagatggaagtcgcgctttcttcaggcgtgaccacgcttctcggcggcggaacgggtcctgcgacgggaagtaaagcgacgacttgtacatccggtgcatggtacatgtcgagaatgctggaagcggccgaggagtttccgatcaacgtcggtttcttaggaaaagggaatgcatccgataaagcgccgctgatcgagcaggtggaagcaggcgcgatcggcctgaagctgcatgaagattggggatcaacgccaagcgccattaaagcttgcatggaagcggcggatgaggcggacattcaggtggcaatccatacagacacgataaatgaagcgggctttttagaaaatacgcttgatgcgatcggcgaccgggttatccatacatatcacatagagggagccggcggaggccacgcaccggatattatgaaactcgcatcttacgccaatatcctgccgtcctctacgacgccgacgatcccgtataccgtcaacacgatggacgagcatcttgatatgatgatggtctgccatcatttagattcaaaagtgcctgaagacgtggcgttcagtcattcacgcatcagagcggccaccattgcggcggaggatattctgcacgatatcggcgcgatcagcatgacgtcatctgactcgcaggcgatgggcagggtgggagaagtgattatccggacatggcaggtggccgataaaatgaaaaaacagcgcggcgctctatcaggagaaaacggcaatgacaatgtgcgcgccaaacgctatatcgccaaatacacgatcaacccggccgtcactcacggcctgagccatgaagtcggttccgttgaaaaaggaaagctcgccgaccttgtactatgggacccggttttcttcggcgtcaaacctgaacttgtgctcaaaggcggcatgatcgcccgcgcccagatgggagatccgaatgcttccattccgacgcctgagcccgtgtttatgcggcagatgtacgcatcatacggtaaagcaaaccgaaatacctctattacatttatgtcccaggccggtatcgcaaacggtgtgccggaaaagctcggccttgaaaaaatgatttctcccgtacggaatatccgtaagctgagtaagctcgacatgaagctgaatgacgcgatgccgaatatacaagtcgatccgaaaacctatcaggtgttcgccgacggagaagagctggcatgccagcccgtcagctatgttccgctcggacagcgttatttcttattttaatccctcttcggccggtttcccgccggcctgtttacacctctattgccaacttgatttcatcctgccgcccgttttagtgtatattagtagttgacaaacaaatgaaatgtaactattgcggttacaacggtggtgaaaaacatgattaacagccgtcttgctgtggccattcacattctatcgctgatctcaacggatgaacgggcgtcatcggatatgattgcgggcagcgtaaacactaatcccgtcgtcgtgcggagaacgatcagccagctgaaaaaagcgggtattctgacatcccgagcgggtgttccgggagccagcctgaaaaaagatccgtcggagatcaccctcttagaggtttacagggcggtgcagaataaggaagagctttttgcggttcacgacaatccgaaccccgactgtccggtcggcaaaaatattcagcgcgcgctcgatgagacgttcggaagcgtacagcgggcaatggagaatgaacttgcgagcaagtccctttatgatgtaatgaatcatctcttttgttaaaaagagatgggttcatgccgctataggtgtaacaaaaatggttacaagttataatgaggaaatcacggttttggctccatattcagacaagcctggatgcggattgcgatctgtttaatgaagaaatccttcgaaactaaaggaggtggttaccgggatatttatattttgcttaagacttatgtgaaggtgtcagctgtgagctagttaaacaaaaaatgataccctgcctccagcaatgccaaaaccgttcgcctcttaacaatcattgtaaaatttctctaggaacgatcagcagcccgttagctgcccctaattaaagatgagctgttaccacactgttacattagaacttccgctgcttttatatccttctgtcgctaagacttgataagcccaattactgcccagattcattccatggctcttccatgcgttaacatgattgctgaaagtgattgcagcgttgcttccggtcggtctcttcgactggcgaacactccagtactgcgtaaaagtagtgttatcgccatcaatggaaggtgcattataacgtgtcgttgtatatatgtcatatgtacctccatcactgtttacagtccctttatacgttccggtaggtctgtaagtaccccatgaatccactacataatattcgatgagaggtgctctcgtccagccatataaagtcaaatatccattgccattcggcgcccagactccggcattatagtttattgttctaaatggcgagcctgtagtccagcctttaccaacaacgaaatttccggtattagaccaattaacactgtaattcccgccagatccattgactgcgtttactgttccgcccccatcagtccaattttgccagtaatctgtaccagctgcagaggcggttgccgaaaacatgctgatactcatgaaagctgccgttaatccaactaagaatttctttttaaacttaaacatatgttacctcctatactattttttctgactttgacatgaggcagcactcgtaaatatttaacgaacgccaacgcttttgatcgttcctttcaatataatagcatgaatacatgagtgaatattaagaacaattgtaatttaattacaaagacccaaaaaactgtatgataagtggtcttgttccatcagggcttttatccttattttgcagaatcacaattcttgcttctaaacctgatcaggaacagtcgaacaattgagtgatttcagttgaaactctgaggaaaagctttatttgaataaacttttttgagctgaagccggaatgtctgaaagaatatttgcagacagctgcatcagctgcgccattatgccatcgccgtattggcaaatccgaagcacaaaaacgaacgctttaccgttattgaagaagcggaataagaaaaaatcccgggcggatgcgccgggattttcctttttaatatgtattggcatcaatattattaaacacgccgtccacgatgccgagcgtcatgaggacaatgaagagaacgataccgagaacggacaagccgaccgtcacaatcaggtagatcccctgcattttcacgaactttgcataattctccagcatatgttcctctgtcagttcattgaactgctccgccatctgtcccgcttcatttgccgagcgcatcagaaaaatgccggcaatgatctgcagaacgccgggaatggctccgattaaaaagaaaaacgcgcccgacagcgccgcaaacgcacccacgataataaataaaatacctgtcgcttttccccatttcgaaatagaaataagcgaacgattcactgattcaggtttcaaactatggcactcctttacaaaaaaatactcacttttcatttatacactattcggtcattcttttgaatataaaatgtgttttttcatgccgtgtccgtttttatatcagaaaattcccgagaaaacaccccgggaattacaaaatcggcgaaagaagtcttgaaatcgattctttaatgcggatccgcagcgaacgctcctgatattcttcatacgtatattttctggagacgagcagatcttctttaaatgaggaaatgagttttttcgcaatggtgacgtcataaataaaggcgttgacttcaaaattaagtctgaagcttctgacgtcgatattcgccgtaccgactgaagccgtctcatcatcgacgacaatcgtttttgcatgaataaagccgttatcgtaaatgtagactgaggctccggctttcaaaagatcgccgatgtaagataaagtcgcccagtaaacgaaagcgtgatccggcttgttcggaatcatgattttgacgtcgatgcctgacagacaggcgatcctgagggcatctaaaagacttgagtcaggaataaagtaaggcgtctgaatcaggattgaccgtttggccgttgagatcatcttgatatagccgtttttaatttgttcccattctgagtccggtccgctcgtgacaatctgcatcccgacgttgcccttcggctcgcattccggaaaatgattcggaacgtatgtgagcgtatgatgatgggaggcttggttccaatcgaggataaaccgtgtctgaatggcgtgtaccgccgtgccttgaagcctgaggtgcgtatcgcgccagtagccgaatttcggattcaggccgagatattcatctccgacgttaaagccgccgacatagccggtttcgccgtcaatgatgacaagcttgcggtgattccgataattgagccgcaaattaatcggacgaagcctggaaggaaaaaagacttccacatggccgccggcgtcccgcagcggtttgaagaatttttttctgagtgatcttgaaccgagttcatcatataacactctgacttttacgccttcacgtgcttttttcactaaggcatcgcgcaatttttttcccagttcatcacctttataaatatagtattgaaggtgaatgtgatcttttgcgttggaaatgtccttcattaagcgtttgaacttatcgcgcccgtccgtcaaaatctccaccgaattatcctctgtaaagaccgcgtggttgttcatgacaagcatatagatgaggtctttattatccacagtcgccctgttgttaaattggaattgcctcgacttcagatctttcagctgaaacttcagcagcttttctatcccgatttttttacggtcttcccactgaaacagatgcttgcgtctcaggttatggccgaataacaggtataaaataaaccctaaaatgggaataaaaaaaagaaccaagagccaagcccatgaagcgctggcatcgcgtctttctttgaaaatcatgatgacggccaaaagtatatttaaaacgaaaaaaaatccgaataaaataaatgaaatgctcactttgcaaccccgctatatcatatttatcaagactgtgcccattagtattccgacaagtgcagcaatctgattcccatttcaaattataacattgacattttgaaagaataaagagccggaatcaaagatgaatgcagttttctttcaaagaaagttccgagtgcggtaaaatatgcatatatgaaaaagaagacaaaaatgacagcaaaggggagagggcatgaagctggagcatgcggaacaattgccgggattcataaaaaaagaaattcagaaaatacaaatcgccatcgcgccgctgatgaaaaaaagcatcatttaccgttttcttgctttcccgctcgccgcttttagtctgtttcatctggcatcgcttttgattcaggccccttccgggagaggagctctcgtatcggccggcatttttgccctccttgcggctctgggtcttgcgttttttaaggaagccggccatcagcggaaacaggtgcaaaaaacgatccgcctttatatgctgaacagaatcagaaaaagcgacattctgtccgaggaacggaaaagcgcctatacccggctgattgccgaggagccgtctgcgatgaagagctttattgaatttttaacggaagaagaccggaaaaaagaaatgctttattaaaaaagagctgacacgcgatcagctctttttgtcattcaaacaccgggtcgttctcatagtaatatgaatcaggcgtgtcatacgtatcagtgctgtgataagcgataattccgatgacagcgaagatgacgactaaaataaaagcgagaatgcccaataccacactggatgccgcgtaaaaaaactgcattttgataaatgacgcgtaatgtgcaagcatattttcttccgcgttttcttctagtccttcctgaagggcggcagccgcttttgccgagcgcatcagcatgacgccggaaatgatgagcagaacccccggaatggctccgagcagtgtcacaatggctgacagagcggaaagagagcccgtgatgatcagaaacacggcggtgatctttccccatttggcgatgtcggcaagggaacgggcttttttattgagcggctggttttcgtctttctctttatcgatggtgatcatgacagttctctccctaaaatgttcaagtcatatcgttttccgtccatttcggcgatacccgggaatacgccccattcggtaaaaccgaatttttcaaacagcttaatgctcggcacattatgtccgaagataaaagccatcaggctgcggatgccgattgccggagcgagtgccagggcttctttcagcaaaaagcttcctgctcctttgccgcggcaatcctgatgcagatagatgctgatctccgccgttttgtcataggccggacggccgtaaaacgtttcaaagctgatccaggccgccactttgccggtttcatcttccgcgaccatcagcgggcgccggtccgtgtgccgcaaaaaccaatccatccggtcttcgggcgtcacttcttccgtatcagccgttaccattcgtgaggcaatcgtcgagttgtatatggccaccaccgcatctaaatcctccaatacggctttgcgcagggtcaaattcatattccgggatctcccttcacattttattacataatcaagtgcaatctgcacatactatttccaaaaaagttttttatggatgtgtatatattttcagaaaagtgttcagaatgttgctgaggtgatgaacaaatgagagaggaagaaaagaaaacttctcaagtcaaaaaacttcagcggttttttcgcaaacgctggatattccctgcaatctacttagtcagtgcggccgtcattttaacagctgtcctttggtatcaatccgtttcgaatgatgtgaaggacaatctgacgaacaacggaggaaactccgcgtatgacagcggcaaagacgatgccgtcgaagtaggcaagtcaatggaaaacgtcgcaatgccggctgctcattctgaaaatgtttctgttgtgaaaaagttttatgaaactgatgccgcaaaaaaagagaaagaagcagcacttgttaactataataacacgtacagcctcagtaaaggaattgacttagctgagaaagacggaaaatcatttgatgtttctgcttctctgagcggtacggttgttaaagctgctaaagacccggtactgggatatgtggttgaaattgaacactcagacggcctgtctactgtctatcagtctttatctgaagtcagcgtggatcagggcgacaaagtaaagcagaaccaggtcatcggtaaatccggaaaaaacctttacagtgaagaaagcggaaatcacgtgcactttgaaatccgcaaggacggcgtagcgatgaacccgctcaattttatggacaagccggtaacatctattgaaaaagcggcggctgaagagaaaaacgctgtgacagaagaaacggaagggtcaattcagcagtcttccgagaaaaaagatgtgacgcctaaaaaagaaaccgaagaaaaaccaggtgacaaagaggacggcacaaaagacaagacagatggtaaagatgacggctcaatgaaagattcgggcaagtaatcttgatcccaaagcgcctatcagctcagataggcgcttttcatattgccgcatgtgcctttatactagtagaaaacgaaggagatgctgaatgaataaatgtctggcggccgggtggctcgtctttgttttcgtttcggctttgacggaaagctttcacgatatgattgtgtcacagacggtgtccttccgtttcacgccgcatccggatgtgtccggtttctttgtgttcgatatggcggagctcgccataccggaagcggcgattcaaaagctcgggcacgcgttttcattttttgtgctcgcctatttgtttttcagagagcgcaggcgcatgaagagggcggtgctgtatgcattggccgccgctttcctgacagaaatcgtccagctctttttcggcagaaacggatgcctccgcgatgtgctgattgacagtctcggcattgccgcattctgtgctttacaaaggaaaaagcatacagccaaacatacaaaaaccggcagtctgtgacagacgccggctttttttatatattatggtttgtcgatttgcttttatgaacgatactttcatagattcgcacgatcagatcgacaatcggacgaagcacatttgaaaatctgaacagcaggaatccgacaatgagggaaacgataatgcttccgagcacatcgatcggataatggtggccgacccaaattcttgagaagccggtcaaaaggccgaaaatcacaagcggccagccgagttttttgttgcggaacagaatcgcaattgaaatcgccaaagcgcctgtcgtatggtcactcggaaatgaagcatccgcggcatgagggatcagcgtatgaaccgtatgttcgacaaaggggcgcggctcgacatagactttcgtgatgaggtagttgacgataagcgctgcaacacccgtgaagcccgcgtacagggcgttttgtctgccttttgtgcttccgaacagccacatggcaagcaggaaaagggcgtaggcgtaaatggcgtattccgtaataaataccatgatagagtcgagaatggcactatggtgcgacaaaccattgatcgctttaaatagttcgtaattcacaaatatcaccttttatctttattttatatgaacagtgtaatgcttttttctatgagacacaattggtattaaaaataatcataaaaaagtaaacagaatgaaacgtgactgtattactgtgcgtcaagtatgcgggaaaagaatagccgaaggagttttgtccgttgctgaaacgtttgaaaaacgccgatctgccgcttgtgtttgtcattatgctgctttgcggattcggcttgttaatggtgtacagcgccagtgatgtgatggggtctcagcggtacggagatccatcctatttcttccataagcagagtgcctctttactgatcggattatgcttatttctatttgccgcctgtctgccgtataagcggtatgcgcggcttgtaccgctgtttgtggtcggttcgctggtattgctgctgctcgtattgataccgggaatcgggctggagcggaatttttcccgcaggtggctgggagcgggcccgcttgtcgtacagccgtctgaattggcgaagatcgcgatgattttgtatttcgcttcgatttatacgaaaaagcagccgtacattcatcaatttgtgaaaggggttctgccgcctttagtgattttgggaactgcttttctgctgacattggcggagcctgatttagggacggcttccttaatcctggcggcgtgcgggtcgattttattatgtgccggcttgaaaaagcgccatctgttcgtgctcggcgcgacggcggtgtcgggggttgtttatctcgcattttccgcttcctatcgtgtgaagcgcctcgtttcctttaccaatccgtttggtgacgcgaatggggacggctatcagctgattcaatcctattttgctatttccggaggcgggtttttcggaagagggcttggaaacagtgttgaaaaaatgaactatctgcctgaggcgcataccgatttcattatggccgtgatcagcgaagagctggggatattcggtgttctgatcgttttgggattatattttgcgttaatgcttctcggcgtaaaaacggccgtgcgggctgatgacccgttcgggaagcttcttgccatcggaattacgtttcaattaatgtttcaggttgtattgaatttgggagcgatgagcggacttctcccggttacgggtgtgccgcttccgtttatcagctacggcggttcttcattaattatgacgctgtttttgtgcggcatactggtcaatatcagtacatatgcgaaaaaacaacccgtacggcataagcggcctgtcccgcatgaaaaaaaggtttcttctttttaatgaagctggaaaaaacgcccgggacatttctgtctccgggcgttctgcctgtttataaagctcctggtccttcttctccggtgcggatattaatcgtgtttccgatttcatagacgaatattttgccgtctccgggctctcccgttttcagcacttttttcgccgtttccacgacttgatcaacggggaccttgctgacaacgatttccactttcagccgttcatacacattgctctcaattttgactccgcggtacagttcggtgtgggctttttgaaggccgcagccgtgtacgttggagaaggtcagcgatgtgactccgattttaccgagttcctgtttcaatgtttcaaacttagccggacgcgtaacgatttctaccttgaacatttgaccgctcatctaagccactcctcactttataagtcctgatatgctttttccccgtgcatcgttaaatcaagcccaagtgactcttcttcttcactggcgcgcaggggaatgaacagacctacaattttaatgataacgaaagtgacattaaatacaaatacataggttgccgcaatggccgcaatctgcttccagagcagtcccggatcgccgtaaaacagcccgtttgccccgccgtcattgacggaagtggtggcgaataaaccggtcgcgatgccgccccatgtcccgccgatcccatgcaggccgaaagcgtcaagcgcatcatcataaccgaaagtctttttgagccaataaacgccccaaaagcagacaagcccgccgatgaaaccgattacgatggaagagaatggcgtaacgaacccggcagccggcgtaatggcgacaagcccggcgattgcgcctgatacagcacccagcatggtcggttttttattcagcatccattcgattaaaatccagccgataattccggctgcagccgcggtgtttgtgttaatgaaggcaaacatcgcgatactgtcaagcgtgagggcgctgccgacattgaagccgaaccatccgaaccagatgagcgctccgcccaagaacgtgtaaattaagttgtgaggcgaagcagccgtgccgtccttgcgtttcccgagcacaatcgccagcacaagcccggcgactccggaagaaatgtggacgacgtttccgcctgcgaagtcaagagcgcccatttggccgatccagccgccgccccatacccagtgcgcaacgggcgtatatacgagggaagcccataaaaaggaaaatacaagaaaagcactgaatctcatgcgttcagcaaatgctccggaaataatggccgtcgtcagtacggcaaacgtcatttggaacatcatgaacaaggaatgcgggatcgtatcactgtaacttccgggttcaaagccgacccccttcagcccggcccattcaatcccgccaagccatgtattgccgggggcaaaagcaagtgaatatccgtacaaaacccaaacgacggatacgatggcgagagaagaaaaactatgcatcgccgtgctgagcacgtttttgctttttaccattccgccgtaaaacaaagccagcccgggggtcatcagccacacgagtaaagcgcaaaagaacataaatactgtatcgcccatctgcatgttgtattcctccgtctcattcagaatgtaattgtgattaattcattattatagagaaaaaagaacgataaaacattttcatgtaaggttatctgacatggttttttgcgttcataatgctgctttttcaaatgggtgccgtgcgactttatatccataaaaagagcgccggagcacggcggaagaaatcctgtccgggaaagagtaaaataaacggggtgagaaacactaactgcatcaggaggaatcattatgacaacatcattaaatctgcaatttgaaaaaacggctttggtccttattgatttacaaaaaggcattgtgccgatggataaaagcggtaccgttgtgccgaacgcgaaaaaattaattgatgtgttccgggaaaaaggcggatttatcagctttgtgaacgtggattttcatgacggagcggatgcgctgaagccgctgacggatgaagaggcggcgggccattcggctccgccggcggactgggctgaatttgtgcctgacatcggagtgaaagaaaatgattatacggtaacaaaacggcagtggggcgcgtttttcggcacggacctggaccttcagctcagaagacgggggatcgacacgattgtgttatgcgggattgcgacaaacatcggtgtggaaagcacggcgcgagaagcttttcagctcgggtatcagcaagttttcgtaactgacgcgatggcgacattcagcgatgaacagcacgaagcgacactcaagtttatcttcccgaaaatcggcagaagccggacgacggaagaatttatcacacagacaaaatgacaatctccaaaaaaagccgcgtcctgttcttgacagccgtggcttcggggacgatgctgaacccattgaactcgtcgatgatttctcttgcgcttcacagtattcagcatgaatttcacctgtcgtttacaacggtgtcctggctgatatcgtccttttatctggccagcgcggtggcgcagcctgttaccgggaagctcggtgatatgctcggcaggaagaagctgtttttgatcgggcttctgcttgttgctgtctcggcggtcggcgcgccgtttgcgccgacttttatgactttgctgatcatgcggctttttcaatcgatcggaagcagcgcgatatatccgtccggcgtcggattgatccgttcaaatatacgggagaagcaggcttcggcgctggccgtcctgtcaatctttgcatcagccatgacggcgctcggtccgactctcggcggttttctgatcgtttggggagggtggccggcaatcttttttgtcaatctgccgtttatcattctcagcttttttctcggaatgtatatgtttccgaaagatgaaaaacgcgagatcggcggcttgaaaggcgtgctccgccagcttgatacgatcgggatactcctgtttgccggagcgattatccttctcctgtcgtttttattgtccttcagtacgaagcctcactatacagaaggcgtattcgggcttttgtttgtcgggctctttatctggcgcgagctgaaaacagagaagccgtttattgatgtcaggctgtttaaaacgcatcggaaactatcgtcggtgtatattcaatttattttgctgaatatattcttttactgcatctttttcgggcttccgagctattttcaggatgaaatgcatttgtccgttcagacaagcgggttgattatgctgtttatgtcgggcatgagtattctggtgtcgcctctgaccggaaaatggatagataagaaagggcttcttcagccgattgttgccggaacctgcctgaccgcgatcggagcggtgctgttaacgtttttctttcttcaagcgcccatgataggaaaagggctgatcctgtccgtgctgggtgtcggctacggcttcggaaatgtcacgtttcaggcggccatgctgacaacgagccccgccgacatggtcggaacaacgtccggcctgtttcagacctgccggtatctcggttcgattttgtcttctgtcattttgggcattcttttcggaaaagaaattaccgccggccattttcatatgcttgggacgattcttatcgttgtcggcgctgtaagccttttgatggcgttccggttttcggttctcctcaaaaaagcctcttaacaggcgcaacaaaaagagacgggctctccccgtctctttttttgtgtaatgtgctcaaaaatcaaaacgattattgtcgatagcgaccaatgttatttacggaattttcagttatattttttcacatgtgatgtaaggaaaacgtacatgcgggagggagaaaatgaaaaaaacaacgagtgatcggctaagcaataaagatttactgcctttagaagacggcgaacggacatggaaagcggtgaattttgcatccatctggatgggttgtattcataatatcccgacctacgcgactgtgggcgggctcattgcgatcggcctttctccgtggcaggtgctcgccattatcgtgacggcgtcactgattttgttcgccgctttggccttgaacggccatgccggaacgaaatacggcctgccgtttccggtcattatcagggcttcttacggaatatacggggctaacattccggcgcttctcagggcgtttacagccatcatgtggctcggaattcaaacatttgccgggagcacggctttgcacattctgcttttgaacatatggccgggctgggggagtctcggcggagattggaatatactcgggcttcatctgccgggttttctgtcgttcattttcttttggggcattcatctgcttgtactgcggcacggcatggaatcaatcaaaaaatttgaagtgtgggcgggcccgcttgtttatctcgtcttcggcggcatggtctggtgggcgatagatattgccggcgggctcggaccgatttactcacagccgggaaagttccacaccttttctgaaacgttttggccgtttgcagcaggggtgacgggcattatcggaatatgggcgacgctgatcctgaatatccctgacttcacccggttcgccgcgtcgcaaaaagaacagattcgcggccagttttacgggctgccgggaacgtttgcgctgttcgcgtttgcaagcatcacggtgacatccggatcacaagtagcattcggagaaccgatttgggatgtggtggagattttggcccggtttgataatcctttcgttatcgctctttcggtcatcacactttgcatcgccgccgtctcggttaacgtggcggcaaacatcgtgtcaccggcctatgacttggcgaatgtcctgccgaaatatattacattcaggaggggagggtatctggccgccgttttggccctgttcacaataccgtggaagctgatggagagcgccacgaatgtttatgcgtttctcgggctcatcggcgggatgctcggaccggtggccggggtgatgatggctgattattttatcatcagaaaaaggcagctctcagttgaagacctttattcggaaaccggacagtacacttattacaaaggctataattaccgggcctttgccgcgacctttctcggcgcgtttatttctttaatcgggatgtacgtcccggcgttcgccggcatctatgatatctcctggtttgcgggtgtcattttgtcatgtctcggttatacggcgcttatgtatattcatcctccttatgtaaaagcggcaagacgaatcgcgcgggaaagagcggccgaataaaaaaagccgggggctgccccccggctttttgtcatatcattctgcgattgaaacgtttccgtccgcttgaagcggcgttctttttttctggctccagccatacaggagtaaagcaatcaggacgaacagccccgctgccagataaatcgaatggaatccggccgaagcgacgaagaggccgaatacatatgacccgccggcaatcccgctgtcaaagaaagtgaagaaggtagccgtcgcaaagcctgaacggtgtccgggcgagttctgaatcgccagcgtctgcatacacggtacgatagagccgtatccgagaccgattacggcaccggacaagagaagcatgagggcgctgtttgtcatcgccagcatgcaaagccccgcggagaacacgataatcgacggatagatgacgattcccggccccactctgtcaaacagctttcctgtgaaaggacgggcggccatcatcgtcactgcgaaacagacgaagaaatagccgctgacatccaacaggtggatcgtctttgcataaacggataaatatgaagtcacacttgaataacagaaagaaatggacaacccgacaatcgcgattttaagcgcgcctttttcaaacatgtcggagaaagaaaaacggaagacagtcgttccgctgttgttttgatccggcacacgaatcataaaagcaatcagcaagcctaaagaaacaaatacggcaaaaatcgtaaagaaaaccgggaacgaaatgactttcacaagactcagtccgagaaaaggaccgatcgccatggcaaggttcatagacatcgcaaaataaccgagcccctcgccgcgccgcttggcaggaataatgtcagcggcaattgcgcccgtgaccgtcgttaaaatgctgaaccagatgccttggaaaaaacgcagtccgagcagcagatagaaattgtgtagcggcaaatacagataagaagacagggcgaacagcgccaaggatacaatcgtcattcttttcttgccgaaccgttcaataatcgcccctgaaaaaggacgggtgataatagcagataacaggaacaggctgatcaaaagccctccttgcgattcactgccgccaagctcctgaatcatatagataggcagcacggccaaaaatgtataaaagaacacaaagacaaataaattcacgagtacgaccataataaaatctttggtccagatcgagtcagatttactcaaaagtacagcacttccctttcttttctatttcgttaaaaacacattcagaaactcagaaaaagcttccttatctccatcttggaaatccgcaagcatgtcttcctcgaacttcagcatctcttgattgatgctgtcgtatttcaattcagcttccttcgtcaggacgacgagcttttcccgcttatcttctccctgttcccgctgaatccagccgttttcttcaaggcgtttgatcgttctggtaacggtcggcgcctctacgttcagataggaccagatttctttttgggtcatcggtccgatcgtttttaagcaatataggattgaccattgagaggagtacaggccgaatggttccagccgttcattggctttcttcgtaatcaggcgggcgcattgattgatttggtgaatgaggcgtctgttgacgtggatcatttccgttctccttttcaaaaaacttacctaagtaactaattgtgctgtttcattctacagcaggatcgcgcggatgtaaaccccccgatcaaaaagcagaaaattatgacccgccccttgtccttattgagtttttagcatattcccaattcattgctaatacactgttacaaacctatcaaagagagtgtttgaggtgagggatcgtgggcatatttctaaaaccttcttatataatcggacaacgaagaagctgcatcatcagtgaatctgttacagaatacggatctcatttcacacttctcacatccaactggggaggtcgagtggtgtgcacgattacatcaaagagcgaacaatcaagattggtaagtatatcgtggagacgaaaaaaaccgttcgtgtcattgcgaaagagtttggtgtttccaaaagtaccgtacacaaagatctgacagagcgcctgcctgaaatcaatcctgacttggcgaatgaagtaaaagaaatactcgattatcataaatccatcagacatttaagagggggagaggcgacgaaactaaagtacaagaaggatgaaattcttgaaggggagcccgttcagcagccgtagcgtctgacgtctgccgggcccttttttctcctcccgggcggtttcgcgaatatccgcaaaattttgtcaagaacttatatcgttcagcagcttttttttgataaattatgataatatatataattagggcacaatgtggatattttactgtgaaacagatatcaaggaggatataaatagatgtttgcaagggatattggaattgacctcggtactgcaaatgtactgatccatgtaaaaggaaaaggaattgttctgaatgagccttccgttgtggcacttgataaaaacagcggcaaagtgctggctgtcggtgaagaagccagacgaatggttggacgtacacctgggaatattgttgcgatccgtccgctgaaagacggcgtaatcgcagacttcgaagtaacagaagccatgctgaaacatttcattaataagctgaatgtaaaaggacttttctcaaaaccgcgcatgctgatctgctgcccgacgaatattacatccgttgagcaaaaagcgattaaagaagcagctgaaaaaagcggcggaaagcatgtgtaccttgaagaagaaccgaaagttgccgctatcggcgcgggtatggaaatcttccagccgagcggtaacatggttgttgacatcggaggcggtacgacagatatcgcagttatttctatgggcgatattgtcacctcctcttctattaagatggctggggacaagtttgacatggaaatcttaaattatatcaaacgcgagtataagctgctgatcggtgaacgtaccgctgaagatattaaggtgaaggtcgcaacggttttcccagacgcacgtcatgaagaaatcaccatccgcggccgtgacatggtttccggtctgccgagaacgattacagtaaacagcaaagaagtagaagaagcccttcgtgaatcagttgccgtcattgtgcaggccgccaagcaggttcttgaaagaacaccgcctgaattgtccgctgacatcatcgaccgcggcgttatcattaccggcggtggagcgctgttgaacgggcttgaccagcttcttgccgaagagctgagggtgcctgttcttgttgctgagaacccgatggattgtgttgcggtcggaaccggcgtcatgctggataacatggacaagcttccaaaacgcaaactgagctgatgataaaacctcattctgaaaaagaatggggtttttttctgacaaacccttcacgaacgggaatgtaaatccgataataagaaaaaatgctgattttcattatagaacaaatgttccggtgaggcaactggaaataatgctatttcagaggtggaagacttgttaaaaggattatataccgcaacgtccgcaatgattacacagcagagaagaacggaaatgctgtcaaataacatcgcaaacgcgaatacgtcagggtacaaagaggatcaaggttcaatccgcgcctttcccgagatgcttctgagccgaatagaaggcgacaaaaaaacgaaaatcggctccgtcaacacaggcgtatacatgcaggagctgaaaccgttgtttacgcagggaagcctgaaaacgaccgatcagccgacggatatcgcgcttatggagaatcaggttcccaagaatgccgaaacgaatgaaaacgccgagctgttttatcccgtgcagaccgcaggcggcgtccgctattcaaaaagcagcactttctcattaaatgaaaacaatcagcttacgataaacggaaaccttgtgttatcaacaaacggacagccgattacagtcgacaatgaaaaattcaccgtatcagaaaacggaacggtcacgacaaacggccggccggcggggcagattgatatcagaatggaagaagacgtgcgcaatctgaaacgggacggcaatgacctatacagcacggccgacggctctgaactgccgagcgcggcggcgaatccccaagtctcgtattcattaaagcaaggcgtctcggagctttcaaacgtggacgtgacgagcacgtatacagagatgacggaagcatacagatcatttgaagccaatcagaaagtcattcaggcttacgataaaagcatggataaagccgcaaatgaaatcggcaaagtgtaacaaaatgggggacattcaattatgatgctcagatcaatgctgacggcttcaacagccttacatcagcttcagcagcagatggatacagtcagcagcaacctttcaaacagtgatacgacaggctataaagcgagggactcccgcttttccgagctgatcagacagcagtatgaccacatagatgacaaaaaggaaaattcgccgaacatgcggaaaacgccgcccggcctgcgtctcggcgccggaacggtgatgactccgcagctggactcagggcagggaagcatcaaaaaaaccgaccgtgaccttgatatcgcgttcacatcaccttatcaatatcttcaggcagaagcggacggacggcgggtgtatacaagggacggctcactttccctcaagccggccggcggaaatgaccggctgcttcagctgatgacagcgggaggcaatcccattctcgatgagaacggtcagcccatacaaattgacagttcgctgactcagctgaaaatcagcaaaaccggaacgctgactgcttcggaccaggcgggaacccgttcgcagacgtttaatctcggcatcgtcaatgtcaataatcctcaggcgcttcatgcggaaggggataatctgttttccgtaaacggcgcgggggcttcagcgattgaagagcttaccggcgcaaaccggcaggcaatcggtatggagcagggcgcgcttgaaagttcaaatgtcgatatgtcaaaagaaatgaccgacttaatcgtgtctcagcgttcctatcagctgaacagccgcacgattacattgggagaccaaatgctgggcttaatcaactcagtgagataaaagaaggggcgttttgatcagccgcgcatgataaaaaatgcggctttctcaaaatcgcccttttttttgtagtaatcagtaatatcctgaagcagcacttccaaatccacccacgcttcaattttctgcaactccagcacaagcttctgcaatcggtcgtacgggtcctcctgagcggtgtacagtatgttgagcgcggtcagcttcaatttcataatcttgttctgcactttttcagatatgtataatcctttctgcagcacggtttgtccttcggcggcagagccggttttaaaaagtgctctgaccgcttcgtacacacaatgaaggtaggaaacgggagactctttctcgaaacgctgattgcccaatacctttttgtaaaaagggagggcctctttatcttttttctgggcggtctttaaaaaaccaaaattataataggcgtggcacagcaggttattgtcattgatccggtccgttatctttatggattcattgaagagctgttctgcgtcgtcatagcgtgcctcgtctatataattcacggcgagaagcagccggcagctgagcgtttttttgatgtagccggcttcatcttgatagatttccagcgctttattgacatattgaatggagagcgcaggcgacttcatcatgtaatatgcacccgctgttttataataaaattcagcggcttcgaaacggtcctgaatggccggcaggtactgttcagcttctttaaagcggcagacagcacggttcggagcgccattcaccatatggaataaccctttgaaaaaatagaaataataagttaattcatgatccatctcatctttgcgccgcttcagctcgcagaacagcttattcagaccgtcttttttctcaaacagcagctgaaaccgtgcgaaaaacagctgatatctgagtttgagctttgcattcttttgtaatttggggagatgctgattgatttgttcgtgaagggaacgggctagatcgaattggcgttttcccatggcgtcataccactcattcagcatcaccagcgtacgtttttcagtaaacttagcaatcatcttccaacctctttgcatagggtaaaagtctttatttatcataacacattaatggacgaggctcattgccagctggttacagtttacagcgcggttgaaaaagaaattgattcataatatacttccaaatgtacagattggtgccacatatgccttctatacatactattgtcgatgaaggagatgtcaagagaatgcttgatactcagcaaattaaagaaattattccccatcgctatccgtttcttctggtagacagaattacggaagtcgaagaaggaaaacgggcggcgggatataaaaatgtgacggcgaatgaagattttttcaacggccattttcctgaataccctgttatgccgggcgtattaatcgtagaggctttggcgcaggtcggagcggttgcgatgctgattaaagaagaaaaccggggcagactcgcattttttgcggggattgataactgccgtttcaaaaagcaggtaaaaccgggtgacaagctggagcttgaggttgatattacccgcgcgcgcggtacgatcggacgcggcaaaggcgttgccaaagttgacggcgagctcgtgtgtgaagctgaattaacttttgcgctcggagaataaaagcaaacaaatgggcttataaaaaagcccattttgtatagaaaggggtgaatgtgatgtggtcagaatttaaaagctttgcgatgcggggcaatatcatggatctggctatcggtgtcgtcatcggcggcgctttcggcaaaatcgtgacgtcgctcgttgaagacatcatcatgccgcttgtcggcctgcttcttggcggtcttgacttttcaggactggccgtgacattcggcgatgctcatatcaagtacggaagcttcattcaaacgattgtgaacttctttattatttcattttctatttttatcgtgatccgcacaataggcaagctgagacgtaaaaaagaagcagaagaagaggctgaagaagccgaggaaacagatcagcagacagaactgctgactgaaatcagagatctgctgaaacagcgggctcctcacaatgactagtgcacaaaaaaaggctggatgattaacgtccggcctttttcatgatcataatttttgtttaaacgcttcaatcagccggctgcccgagtagccttctttcacgagcgactccagaatgctttctgatccggggtggtttcttgacaccatttgaccgtaaattaaaacttgtatacttctttccagctcgacgatatttttgatgcttcccgtcagctgggcggggcggttgctttttttcgtaatcgttacaaacaccttcgcttctttctggcttttcatcagcatgtcaaaaaaagacaagtgttcggccgggaccagtgcttcaattaaccagtgattttctccgtcctctttattgataatcaatccgtctaaaaggggaaactgctcaatcggctgatcgtctttatctaaacgttccacattcagatcaaccagtttaaaggttttcatctcttattttcacccctgttgtccatgtttttcgttcatttattataacacatatcatttttcccgggaaaatgctgtaagacatgcttcatcatttttgtaggcggtcaacatttaatcatttctattttttcattataatgtaaaagaatatggtcatggagagatgcttatgaatcaattgcgcctgaaggaaatctatatagaagacggttcaaggcgaaaagacgatcattcctacttggtatgcaaaaaggaagattgtgaggtgcatcttaacagaaggggaaatgtcgtctttttatatgaaacaaaagaccgcatggaacagtataaaattcagctttcactgactgataaaaagctgagtttttactggttcgcatgggacggcggaaagtttgtccgcatgtttgagaaagactggctcaaaacgaaacttttctcgcggctgctcaaaaatacatattacataagcggccaaaaacaaaagttttttttatcagaaagaaaaacgaaaacataagagcagcctgaacggataacggctttatccgctttttgctttcacgagcccttgtactacaatgaagccagcctcgaaaaagagaggaggatacggcttgtttaaccacgttatgcttgtcggccggctgacgaaagacccggagctccgttttacagcagcgggcattcccgtcgcgcatattacgttggcggtaaaccgcaattttaaaagcgcgtcgggtgaaaccggaaccgacttcgtcaactgcaccatctggagaaaaaacgctgaaaacacggcattgtactgccaaaaagggtcaatggtcggtgtaagcggcagaatccagacaagaagctatgaaaagacagacggcgtaaaagtttatgtgaccgaggtcatggctgataccgttcggtttatggatcaaaaacagaaagagcaactggctgaatagcattcttttttcctcgatttcccgcctttcagcgggccccgcaatacctccttcccactcgccagtcgaaagactggtttttttgtgcgggagctaaaaaatggttaaaaagaagtgatttcgcttatgaatacttaaaaacattgaatatattgggataaaaacttataattacttacagataagtgacgaaaaagggaatgaggacgtgtatcaagaagaaagactgattgcgataatggaatatttgaaacagcatcggcggatcaccgctgaacagatatgttcgctgcttcatatttcaagagataccgcaagaagggaccttgtaaagctgaaagagcgcggggccattatcagaacacggggcggcgcgattctgccgtcggtgaatcaggaggttcctggctattcgggccggctgaaaaccgtttctgaagagaaaaacaaaatcggcaagctggccgcatccctgatccataaaggagaccggatcatcctggacacctcgacaaccgtgcaggcctgcgcggagcatttaaatgtcaccggctgcactgttattacaaattcgatcaatcaggccgatatcctttccgcaaaagagggaattgatattcacctgctcggcggaaagctccagaaggaacaccggtttttatacggggcttccgtcgtagaaaaactgggggattatcacgccgataaggtgctgatcggcgttgtcggcatctcggaaaacggcctgacgattccgcatgaagaagacggcatggtaaagcgtaaaatgatccgacaggcggaacaggtgattgcgctgagcgatcactccaagcttggccgtacgagtttttatcagtatgcagctctgcatgagattgacctgctgattaccgatcagctgcctgatcaggatttttgcgatctgctcgaccggcacggcgtagaattgcttgtaactgaatctgaagaagaggatgaggacatgtgaaactgattgccatagatctggacggcacactgctgaacagcagtcatcaagtaagcgatgaaaatgagcgggctttaagggatgcccggcaagcgggaattgaaatcgtggtttccacgggacgcgcgcattttgacgtgcactccatattcgaaccgctcggcataaaaacatggattatcagcgcaaacggagccgccattcatgctcctgacggcagcctgtaccactgtgatgcgattgaagaaacaagagcccgcggcattttgtcatggcttgaagagaatcaatattactatgaggtgtttacaaacaaagccatctatacgcctgaaaccggcaggcagctgctcgatatcgaaatggaccgggtgaaaagcgccaatccggaaaccgatctttccgttttggaacaggcggcttcagtgcaatacagccaatccggctttgcttacattcattcataccgtgagctctttgagaaagaagagcatctggatttttataatattctcggattttcgtttgatgagcggaagctgaaagcgggctgggaccgattcagcggtcagaaagatctcacccttgtcagctctgccgatcacaacttcgaactggcgtctcgaaacgcctccaaagggcaggcgctcaaacggctggcgcaaaagctcggcattccgatggctgagaccgccgcggtcggtgacagcttaaatgactattcaatgcttcaggcggccggaaaaggcatagcgatggggaatgcgagagaagatattaaggagatcgctgatgccgttacattgacaaatgatcaaaacggcgttgcgcatatgatcaggaatttactgtgaaaggtatggcgatactgttcatgactggcgtgacgcattcatggcaaatgcggcgtaacagtaaggacgacataaaagaccggctcttctgagagagccggtctttttgcgtttaatgtgattgcgccgatgcgctgagggtgaataattcttcaagctcagcggatgacagctcggtaatccaattttcactttggataatctgatcgttcagcgtttgtttcgtttcgagcatggcatcaattttttcttcaatcgttcccgtcgtaatgagtttgtgaacgtggacgaaccgttcctggccgattcggtaggcgcggtcggttgcctggttttccaccgccggattccaccatctgtcatagtgaatgacatgattggcagccgtcaggttcaggccggttccgcccgctttcagtgacaaaatcagcgtcgggtattctttcttctggaaccgttcgacgagagaatcgcgttcctgcttggataggcttccgtttaaaaactgaaccggttctccgaatgttttttccaggaggcgcttcatcatattgcccatctgaatgtattgggtgaaaatgaggcagctttccccttgtccgcggatcaccgccattaaatcaagcagcttttccagtttgacggatctcccgtttaacagctctgtctgttcttccttcaaatagagcgcaggatggtcgcatatttgcttcaagcggccgagcatgctcagaatcagcgctttccgctgcatcccggtcagagaagccatatgttcaaatgtatctttgacaagctgttcataaagggatgcctgttcggctgagagcgggataaactctttttgttccagcttgtcaggaagattaagcgccacttcttcatcccgttttgtccggcgcagtaaaaacggccggattaactgctgaagctggttgattcttttttcgtcacggtctttttcaatcggcagcacatagcgtttatgaaagccggtcagactgccgagatagcctttgttcataaaatcaaagatcgaccaaagctctgtcaggcggttttccatcggtgttccgctcagcgcgatatgatggacgcctttcagctttctgatcgcgcgggactgcttcgtatgcgcgtttttaatattttgcgcttcatcaaggcagatggtgctccatgtcacggaagaaagctcttcctgatcggcgtgcgacaggccgtaagaagtaagaacgacatccgcgtcctgataggccgggacaaatgcttcccccttcggccggcgggggccgtaatgaagcacggcctccagctgcggcgcgaaggtctggagctcacgctgccagttgccgagcaccgatgtcggcgcaatgattaaggcaggcgctttttgccggccgctttccttcacatggagaaaataagcgatcatctgaatcgtctttcccagtcccatgtcatctgcgagacaggcgccgaagccgttttcccgtaaaaacagaagccagttcatgccgtacatctgataagggcggagctggccctgaaacgcggcgctgacttcatgctccggcagatcccgggcatccgtcagtttgcggatcaggcttctgagctgctttgataattcgatcttgatcccggcaaatgccgatgagtcaatgaggtccgtgtcctcggctccgttttccccgtgatccatcagttcgcgcgccagcacgtcggacatgtggaggccctcagattctgctttttccatcagttttttcatttgtttaatgaattgaggatcaattttcacccattggccgcggatgttgacgagacgtctgttgtttgcgacaagctcattgaattcatcctctgtcagctcaattccgtttgtggcgaatctccagttgaaatcaagcagagcgttcatgccgacgaaggactcgccccgcggcgaggatgacactttcgccttgagcatcatattgctgtcccggacaatctgccaccatgatgggagaagaatctccacacccatatcgacaagcgtctcactcgcttccgataagaagatccaagcctcttcttcagaaatcagcgtcgttcctgaatcaaacgaaagccagggaaccgttctgcggaagcggtcctgttcgcgcgcgatttttccgctgtatgcctgccacgcttttttcagtcccttcagtccgtcaaaaaaggtgatggagccggtttttttctcacgtaaaaacatttcgattttccagtcgtcaccgtcgaaatcaggctcgtttaatcggagcccgacggtaaacggcgtcagatcgtcatgccagccgattccctccagaaaatcatcttcatccaaaaaggagcctttaaacgtatgaacggccggcgagcgggtttcgatctgccgccatttttccagcaggtcatcattgtactgaatgtagtcctggaccgcggctgagaaccagtctgccgtaaagccttccagcaaaagctcgcggtctttgaagcgcaggacgccattttgccaagcctcataatccggaagaaaatcgccgtcggcaataaattcgtatatcgtcgaagccgcttcgattaacggttccgtttcctttgtcagctgcacggtgctgaatgaattgaacgagttttttccgagcagctcgacggtcatccacgggctgagcagaacggccggggtgccgatgaagctgacgtcttcaagaaacgttccgtaaaaggttgactcatgccattggaacaaatgagtcttcatctgactgagagtaagcggctgctccttctcatcatggcttgacagcgtaaatgtccaatcttccatttgttctacatgaatgaaaatttccttaagactcgccatcaatcaactttcctttctgcaattcttcttgaagggcgcgcagcctcttgtagcttgcgctcagccggctgatataccgctcccatacctgctgtttctttgcctttttataaagcgtccgcagttttttcagatggcgcgcagcctctttataggcgctgcggtttttttggtcgataaaaaaggccgccgcccggtgataggaggggatgagcgcttccggatcactggcggcaatttcctttaggatgtccttttcgatttcccagacggaaaaaccgacgaggctgtgaatctccacccactccgcgtaccgccgtttttcgtacaggtactggctgtattcggtaaaggtatagggaaggcagccggaagcaaaccgttcaaacagctgatcatcccgtgagtgccgcgcataatccgccaatagcgcaaacagctctccgataatgtcgcgcatttctttaaacggcttatcaagcttcgtatagttcacggcaagcggttcgatccggccataccaagctttcagccgtttccagtcttttttcgcggtgagttcaccgagccattgaaaggtatacggcagcgcttcaggagggaagcgggacatatcttcaaagacagattcatcatctttttgcaaaaaggccagatgaagccgtccgaaccgcacttccggcgaaaaacggcgcccgctttcctgttcgagaatctcctgttcacgcgcaacccatttcggccggttcaaaagcgcgctccacatctcaccgaatacccggaggcgttcgtattgaaaaagctcttctttcacaagcagtctgcggagcaccgggggcgtccggtctaaaaagggatcgagtgaaaaagacaaagcgtacgttttcagtctgtcaatggaggaataaatcgtatccatcagctgttccacgtatggattgatgctgtaataatctttttcggcatccaatctgcctgactcaatcaaagtgaacatgtgaagccagacggcaagcgccgaatgaatctgatataagcttttaagctcgggttttttcggggcgtgttttttgagcgctgacagatagccgtaataaaggccctgcatcgtctggcttccggccggcgtccgcgcctcccacagcgagaattccgaatcaaaaaaagcgagccagcttgacagcgactcttcattcggcagcactttttcctgaaactgccggcggacaagctccctgctttcctcaagcttttctctttccagccaatgttcggtaaaggtaccgacccgctcgaattgggcatatacgtaaagaaaaacggccagcacgtggcggcagatcgcctcagacgggcatgcgcagccgcttttcaccatgaaaaataagttcagcgtgacccttacaggcacaacatcctgcacatatgcggaaatctctgtcggggtttgaacctgtatacgatagacggaatcctgccgatataaaatgagtgctttcttcatcagctgaacattgtcttcattgtaaggaagaagttctttaagctgttcagccgctgcgagcacatcttctttagcaatcatatcctgaagcatgattatcgctcctaacgagtcacaaaataaaaagattccaattcctctattatatcgcaacacatggcccggaaaaagtttttcctaaaaaaggacataaaaacccgaatgtgtcgaatgatgtattagagattgcaaaacagcacccgacagcatataataatcttgttttcaatttaatggaagccgaaaggaaacgaatgatgaagaaaacgaagttagatcaagaggagtttctgaagattttaatgcatgcgcacgacattggtgagcagtcctctgagatgaccacaaaagaaatgcttgagaatttgatttcttatattaaaaatggatatgcaacataaaatcccgcaggctcttggccgcgggattttttaatcttcctgtgacaccagtatttaaagcgcttacaaaaataaaacagattgaagtgattgtctatttttgtcgaattttgtcatttgaaaaggttagaaatgacagtttaaaactgtataatcgtaattggaaaagatcattggagggaatgggaatacgcggaaagtgatatggaggttatatgggagaatctacaagcataaaggaaatattcgcaatactgagaaagcgtctgctgtttatacttattattaccgcggcggcatctgccgcaggcggactcatcagtttcttcgctcttacgccggtctatgaaaactcaactcaaattttggtcagccaatccaaaaacaatcaaaaagaagtccaattcaatgacgttcaaaccaacctccaattaatcaacacgtataatgtcatcatcaaaagtccggtcatcctcgatgaggtgattaaacagctgcatctgtccatgacttcgaaagagctggaatcgaaaatcacggtatccagcgagcaggattcacaagtcgtgacgattgccgtgagggatacggatgctaagcgggcggccgttatggcaaatgcggttgcagccgtttttcaggacaagatcatcgccatcatgaacgtggataatgtcagcatcctttcaaaggccgaagcggcggacagccagtcaccggcagagcctaaccgcaagctgaacatcgcgattgcgtttgccgccggacttttgggcggaatcggtctcgcctttttgctggaacatctggataatacgatcaaatcggaagaacagctggaatcgctgctcggcatcccgatcctgggaacggttacttcaatcagtactaaagacagcgttgccaaaaacttgaggatggcggaaaccaaacaagcggggggcggacatgttgacgcgtaaaaaagacaaacccggaaaacgaagcgtgattgcgatgtctgagccgaaatccatcaactcagaacaatatcgcacgatccgcacaaacattgaattttcttccgttgatacggaggtgaagtcccttttgatcacatccgccggtccggaagaaggaaaatcgacaaccgcggccaaccttgccgtcgtatttgcacagcaggggaaaaaagtgcttttaattgatgcggatctgcgcaaaccgacggttcatttcaccttcaaattggataacggaaccggattaacgtcactgctgttaaaacagatgccgtttcagaaagccgtcctgccggctgatgaagcaaacctggatattttaacgagcgggccgatcccgcccaatccggcggagcttttatcgacgggtgccatgaaagatcttctgtcagaagcagccgaagtttatgataaggtgattttggatacgcctcccgtcttggccgtagccgatacgaaaatattaggcagctacactgacggggccattatggtgatctcaagcgggaaaacggacaaggaaaaagcggccaaggcgaaagaagcgctcgattactgcccgtgcaagctccttggggccgtgatgaacgggaagaaacaaacgaaacactcggactacgcctattacggacaataatgtcataatgggcgcggtccattctttttaaggagggattgaaatatgatagatatccattgtcacatccttccttccatagacgacggcgcggcggatgatacagaaagcctgaagatggcgagagaagcggtcagacaggggattgatacgatcatcgcgacgccgcatcatgtgaaataccgctatgacacggaccggcatacggtcaacgaagcggtcagcctgttaaacaaacgtttgaacaaggaaggcattccgctgactgttctgcccggccaggaaatcagaacagacggagatctgctggcaggtcttcaaagcggctcgcttgtcccgctccataatacaaagtatgtgctggcggaatttccggcggatcatgtcccggcctacgctgaaaggctgttttatgaactgcagctgaacggatatgtccccgtcatcgcccatccggagcggaacagggaaattcgcgaaaacccttccgtcctatacagtcttgtgaagaaaggggcggtcgcccaagtgacggccggctgcattgccggagcattcgggcggaaagcgaaatccttttcgctgcagctgattgaagcgaatttgatccactttctcgcatctgacgcccataatctcggaccgagaaatttttattatcaggaggcgctcggcgttctgaaaaaagaagcaggggctgagctgatttacatgctcgcggaaaatgcggcgcttctcgctgaaaacaaagccgtttataaggaacctccgctgcctgtggcccgccgtaagcgctggggtcttttttaatcgtcgtctccatcccgtttaaatgaagcgtaagcggctgttttgcaagatgattcttttatgcttatgctattatctagcggccggcgccgttttttcctatcatgacctcaggcttccggcattcagccggcgccggaatcatatgataataacggtaagctgcccagcagcaatttctaaacggttgggggaacacgatgaaaataacagtgatcggaacaggctacgtcggtcttgtgacaggagtgtctctttcagaaatcggccatgacgtaacatgcatagatattgatgaacgtaaggttgagcagatgagaaagggattgtcccctatctttgaaccgggacttgaagatatgatgaaacgaaatatcggccggcatcggctggcatttgaaacgagctacgaaaaagggcttgcggaagcggacgttatttttatagcggtcgggacaccgcaaaaagaagacgggcacgcaaaccttacttatattgaaaatgtcgccgaacggattgccgaacatatttctaaagatgcgatcgtcgtgacaaaaagcacggttcccgtgggaacgaatgacaggatcagcgaagttattcattcacggctgaaagcggacgtgaacatttcaatcgcctcgaatccggaatttctccgtgaaggttcggcaattcacgatacctttcacggcgaccgcatcgtgatcggggctgaagaccggcagacgcgggaaacgcttgaccgggttttcgcgccgcttgcgattccggtatatcatacggacatcagaagcgctgagatgatcaaatatgcgtcaaacgcatttttagcggcgaaaatcagttttattaatgaaatttctcatatatgtgaaaaagtcggtgcggatgtggaatcagtcgcacacggaatgggattggataaacggatcggcaatcaattcttaagagccggcatcggttacggcggttcctgttttccgaaggatacaaacgccctcgtgcagatcgcgggacatgtggagcatgattttgaattgctgaagtccgtcattaaagtcaacaataaccagcagtccatgctggttgataaagtgctgaacaggctcggcggtgtgacggggaagaccatcgcgttattagggctgtcttttaagccgaatacagatgatatgcgggatgcgccgtccattgtcattgcagatcgtctggcggctcttgacgcccggatgacagcgtacgatccgatcgcttcattccgggcttccggactgcttccggctgcggtttcctatcgggagtccatagaagaagccgtcaggggagcggatgccgtcctgattctgacagattgggaacaaattaaacacttcccgcttgaagcgtacaaagagctgatggaaaccccggttattttcgacgggagaaactgccactcgcttgaggaagcggaacaggcgggcgtggaatatatctcaatcggaagaagagccgtcgtgcctcagactgattctgtcacttgaaaggccggcggaccgcgccggccttttatcatacaatctttagagacgaaggagatatttatcgtggaaaaaacatggaaattgccgaagcaaatggaatcatcccgcggtctgctggaaacgtcagcacggccttttatcaaactgcacgtcaaaaaagctgaaacgggacggtatgacagtaaaattgcaggagacccctattttccgaaacatgaaccatatcctaaagatgaaagcggcaggccgatgaagcttctcgctcaaatcaattttgcggatatgcccagacttcctgattttccggacaccggcattcttcagttttacatatcggtcagtgatgacgtatacggtctgaattttgacgacgggtgcgcgcaaactggtttctgcgtcaaatattttgaacatgtgacagcagaagaagcggagctcatggatgatttttctttcgttcaggttgaagaggagtacgatttaccgattcaatccgaagcgctgatcacccctgagctgtctgctgaatgggtgctcccgtctgattttcaattcaggcagtatgccgggatggatgcctttgactatttcgagcagtttgacgatgaggtgtatgacgaatatacggcgaacgcattcggccataaaatcggcggctatgcgtccttcacccaggaagatccgcggtcttattctcatcaaaaccatacgattctgcttttgcaaattgattcagatgatgacattgattcgatgtggggagatgtgggaatcgccaatttctttatcagaccggaagatttgaagagaaaagatttctcaaacgttttgtacaactgggactgcagttaacgacagtatgatgatcatgatacaaggcaaaggagacggttaatcactgtctccttttttttagggaatttatcatggatacatagaggagatcgatgaatggatatgccgtttatgtgagtcttttggcgttaatgatgagcatctcggctgttgaaaataagccatttaacctatttaagctgctttctgtctattttaaaatataatatatggaaatatagtatggaaaagtctgtgctttttgtacgactttttgcgtaagacgaggtgaaaacagatgagccattcaagcacattaagccatattaacagcacgatcagccataaactgggcgaggttgaacaccaaattgataaattaaaagaagcgaaaagagagatagaatctctgcaggaagagggcgtatctgaaatcagggacatcctcaggccgcacctggaccatcattggaccggcacttttgctgaagaatttgatgaccggcgcgatcaggcccatacagaagcatacagaatcgtcacagacaaatacgacggttatatttaccgaatcggcttaaagatgacacagcttgaaattgaaaaaggagggctccttgccgccagaagcattgcgagagaggcagagcacctgctgacgctgggagaagaagcccttgacacggtcggagaaaaaatacaatcaatcaaaagaagctggagttggttttaatggcagaaataaaactcaaatacggaaccgtcatgaagcagcttgaatccgtcagcagcgctttggaggctgtttcgatcgggaacgccggttcaaacggaaaaaacaagctcgactatacctccaagtaccaatcccgcgaggcaaagcttgtatcgatgatcagcgaatacaagcaggccgttcataagaatatcgcggacgttaaagacaacgtagattctttgaaagaacaggacgaggcgatcgccgtaaaataacgaaagaaaggacttgccgatgagcaaagtgtttgaatcacaatcgttaacggacgaagcagataagagaaagaaacaatacgaagcccttgaagagcagctgcgtgcgctcaaacaagcctttcaaggcgtggccgatctgggtgatgctttgaaagggaaaggcgcagacaatataaaagatttttttcagggacaagcggaaatcgccgacagctggctgacgcttgtctctgctcaaattgcgtttttaaatggcatttcaggtgacattaaagatcaagaactcagcgatacatatgtggagacttcatttttggagcatgagctgcccaacgcggatttgaaagcttcagagattgtctccgctcataaagcagaaatcgattcaattttgtcaggcatcagcgatattattcatctcgacacatatacgctggatgattacgctgataaaatgggcgatgcccagaaaaccagacgtgacacaatcacggcagtcgatacgcttgatgaatccctgactgctgaatatcaaaacttagaatctctggacaacgcagtgctcagcaaatattctgttctcatgcaggccaccagcaacgggaaaagcgcatcccctatgtactatgacaaaaaagccttccacagcaatgaaatctacaaaagcgtcacggcgacagaaaaacagggaacggactatattgacgcaaaagcccagcaggccgaagcaagacggcttcaggaaaaggctgaagaagaagccaataaaccatggtacgaaaaaacatgggacggcatctgcaactttaccggcgaagtcaccggctattatgattataaaagagcagccgaaggtgttgatccggtgaccggagaaaagctctccaccgcagaacgcgtcacagcaggagcgatggccgccgccggattcataccggtcgtcggctgggcgggccgcgctttcaaaggcggaaaagccatttacaaaaccggaaaaaccgtcattgccgcagaacatgctttagatgcctataaaaccggaaaatccttagacattctcaaaatgactgaaatgggcgcatacggccttgtcgcctcaaacggattcacagaagccgtcacaggccgggatatgttcggaaacaaagtgtccgaggagaagcggaagcaaggggcactggaagctgcgctgagtttggttggagccggtgcattggcgaagcatgtaaacaaaggcataccgcttgcaaaatcgccacaagcaacaaaagttgaaaaagggaaaaagattctagaccaagtaaaagaattcaaagtaccgacgaatgtaaaaattcgtgtccacaagactgtcacaccggatggcgctactttcccaatcattcatgctgatatgaaaacgactgctgtgaaagatcttggggttgtgaagatggtgggtagtggtagcgggaatagtaagaaacttttcggtcaaaatggaactcaaattgcaagtaagacaacatggcaaaatgggaagacagaaagaatagacattgaaaacccaaatccagggcaaagagaaggtcaaattcactatcacgagccaaataataaaaaatggtattttgatgtagaaacaaaaaagttttatgaccaaaaaacaggtgaagatgcacctagcaaaattcaaaaagtacttaaagacaagagtgttcagaaagctataaataagggattgaaatttttaggtgaggatcctgtattttagtataggagtgaagattatatatggaatatacaaataaaaatatgaaaagactaaaagaacgacttgaagatcggagtaatgcaaataaagttgacctatctaaattaaaggatattatttcacctaatatagttaaagtagacgattgctatattctagatctagagtatgagttaactgataatacaacgataaattggaatagaattttgaaaatgtacggggataaaacggggtatgaagcatcgtgtaatgagctccgcataaacgattatttagactgcagtgatttgtctgatgaagagatttcactttatgcgtttcaggtagtagacggttgggaacaacatttaaaagaaaaatttcctgagcataaatttgttgtaattataagtattgatgaaggttttgcgacacttagatttcataaatatagagaagaggaaagcggttggctaaaggccgacattgaagagtacggaaacgaagctatccttgtaaaagaaattaactttagtaataaaatttaactaaaaaagcaggcagttatactgtacctgcttttttagtttttaccttgtgaaagcaagaaacattacaaatgatcaagcttttaatggtaaaactaattcaaaactgttgatttatagagaaaaaaattaaagtttaagttttgtgaaaagtgaaataaaataattcaaaaatgtaaaggagagaatgtaatgtcgcaagaacagaagttaattatattgaacgaaatgtttaaaaaagaaggcgatccacccggcagttatggcattgaactgataaaaaacgaagattgggaaaatcctttagaagatattatgtgtactgaacttaaagaattacttaaacaattgaaccttatttttatgaaagaaatgaaaaatgaattttaataaaagatataatttgttgaaggagtcttcgctagatcgacacacaggacgattgagagcaaagactattttaagagaggaaaaccaatgaaatgaaaatacatcaaattcacgattttgatctaaatgatgaatcggactttattcaaacacaacaatccctaatacataaaatcaacctatcccccgtcatccatccagactccgtcaacacatgcgcaggcgtcgacctcgcttattgggagcaggacggggaaccgtatggcgtatgcagtatcatcgtgattgacgctgatacaaaagaagtgattgaaaaagtgcacagcatggggaaaatcagcgtgccgtatgtttccggttttcttgcgtttcgcgagctgccgctgatcattgaagcggccaaaaagctggaggcagagccggatgtatttttgtttgatggcaatgggtatctgcattacaatcatatgggcgttgccacccatgcggctttttttctgggtaagcctacaattgggattgcgaaaacctatctcaaaatcaaaggctgcgatttcgagatgcctgaaaatgaagtcggcgcctacaccgatattctcattgacggcgaggtatatggccgggcgctgcgaacacggcgggacgtgaagcctatcttcttgtcttgcggacataacattgatttagaaagcagctatcagatcacaatgaaaatgatcaatcgagaaagcaggctgccgatccctgtccgtctggctgaccttgaaacgcatgttttgcgaacgttttatcggaaaaatcacgtgtaacacttgcagtccgggaggctgcaaatgttttttattgatcaggccatctgggaggatgacaggaaccacatgtaagaagcatagacgaagaaacagttatctatatcgaacaacatatcgggactgaaacaaaaagcacctgtccaggtgcttttctttataaatgaggaaccacaagccctccatacaaaaacgccgcgataatcaggaaggccggatgcatcttgaattttgtcaaggcaaggagggaaatccccgcaatcactatcgcttgaacccagccgatcgctttgatgccgtctgcgccgatttgccaggtaagaatgagcatcatgacggcgatgacaggctggacggacagcgtcatacctttgatgacgggagattggcggaagcgctgaatgatgcgcaagaggacgatcaatgcgagcgccgacggtacgacggtggcaatcagcgcaatcaggaacccgggccacccgcctgcgctgtagccgacatacgccgcgattttggtggcgatcgggcccggcaatgcgttcgcaagtgcgagcatatttgagaattgatcgtttgagagccagctgtatctgttgacgacttcttcaaacatcagagggatcgacgccggtccgcctccatatccgagtacgtttgcgacaaaaaacgccataaatacataaatcatgatcatgaggccgacattcctttatcttttgaacgtttatttgtgattttgtcctttaatttaaaatgaaacgcgccgtacgctaagaaaatgataatgacaaagccgggattaatctgtaacgtttgcaggccgataaaagcgatgataaaaaataggatgcccgtgacccagccgaaacctttaagcgctttttggccaaactcgtacgccatgatgccgagcatgacggcgatcaccggggtgacggcgccaatcatgccggcaacaattgctgagtggcttaagacattgacagcggcaaacaagcccgccatagcaaggcatgtaggcagaatgtgggcgagggttgccaagattgcgcctaacgtgcctttcagcttgaagcccagatacgcagccatttttgtggcaatcggtccgggaagcgcattagcgatcgctaatatttctccgaattcatcatcatctatccatttgtatttattgacggcttcatggcggatgagcgggatcaccgacgggccgcccccgaatccgagaatgcccgttcggaccatcgccgccgtaatgtcccaatagggatgtttcatggctatgtcctccttacagcttcatgcccgttctgcttttataccgtttaatcagcatttggcagtcgacgctgacgacgcctttttgcgtatagagccgttttgtcaaaaactcttccatctcctgatcatttgcgaaaatgccgtgcatatgcagcttgctcggtccggtcatatgataaaggcttgtcacggccggttccttttcaagctttaatgcggtttcctccaaatactgcggctccacctccacattaaaaaacacggacacatggcggccgattttcgccgggttgatgacagcggtgaatttttcaatcacaccggcatccagtaaatgctgaatgcggtgctgaaccgccactcgcgacaggttaacccgctttcctacgtctgtataggaaatcctcccttcctcgtgcaaaatcgaaagaatctgtttatccgtttcatcaaggacaagattcggtatgctgtattcatgttccaatccgcttcaccttccttcatttggtagacattattgtatcatgaaacgttacggtatgaagggagaaattttttattgttttcgatacgtaataacttagaattatttcttatcgaaaagtaaatagtgtgtgagattttctttcaggaatgtggatggccgcgaagccgctttttatacttgagaaaatttgtaaaggggcttgccatgaatacttcaaccatcggaacgaaacaaatggtcgtcagtccgcattatctcgcttctcaggcgggggccggcattctggaaaagggcggaaacgcatttgacgcggcagtggcggtcagcgcctgtctggcagtcgtgtatccgcatatgacgggtcttggcggggattcattttggctcacttaccataaagaaacgggacgaatcaaagcttataacgggagcggccgttcagggaagcatgtgacgagagacttgtatcggggcagagaagcgatccctctgcgcgggacagaaagcgccattaccgttccgggaatggcggacagctgggatgccgtgctttcggcgtacgggcgtctttcgctcgctgaggtgctgaagccagctcttgattatgcggcaaacggatttccggtctctgccgaccagtgcgcccacacagaacgcaatctcgctcttttagcctcgatgccttacacctcggccatttttacgagaaacaaaaaagcgcccatgcccggtgaacggtttgtccaaaaggatctggcggccagcttggagcagcttgcccagaaaggcagaagcgctttttatgaaggagacctcgctcaacgcatcacatcctttctgcaaaacaacggcagccgtctgacacttgatgactttaaagcccaccgcggcgagtggacgaacccggtatcctccgattaccgcgggtgcaaaatctatcaggctccgccgaattcacagggttttacaggcttaatgacgctcaatatattggaaaactatgatttttctcagattgaacacggttcctttgactattatcatctgctgatcgaggcgctgaagaagagttttcagcaccggaatgaagtgctgactgatccggcattttctcatattccgctggatcggctgcttgataaacggtatgcaaagcagctcgcggaagaaatcggtaacgtggctgcgccggcggtaagccggccggtcggaagcgacacagcttatgccgccgtcgccgatgcggaaggaaatgccgtttcctttattcagagcctctatttcgagttcggatctgccgttacagcgggggagacgggcattctgctgcaaaaccgcgggtcatttttttcgctggacggatcccatgtcaatacacttgaaccctgcaagcggacgttccacaccctcatgccggcgatgacctgtaaagaaggaaagcctcacatcctgtacggaacccagggaggagaaggccagccgcaaactcagacagcgatgattacgcgcatcattgattacaaaatggacccccagcaggcgatcaatgagccgcgctgggtctggggacggacatggggagaggagtatgaagggctgagggttgaaagcagaatcagccctgaaacgagagaagccctaaggcagagcggccaccgcgtcgagaccgttggtgattttgacgggcttatgggccatgcggcagcgatcgtcattgatgaagaaggctttctccaaggcggggccgacccgcgcggcgacggagcggccgcaggagtatagagctacgctaactgatgaaaaaaataagcacgccaagcgcggcagaaagacccgcgtaaaacgaatcgtacacatattgcttttcctcccgccggtgccgccattccattatgccgctgcagcaaaatagtttcattgaaaaaagtcaccgctgcgatgcccgtaataagcagtgtgatttcgattaatcgatgtgtgccgtttatcggcttctgctttttaacaggctttggcaaattgagaactttgacggcaaatacttgaaacataaggctgagcaaaataaatacggctgaaaaaatcagtaactgaatgaaatccatcatctgcctcctaaaaatgtgtctctcgtttcatacgagtgatggccttgtaagtttcggcattctataagacattaggctgagttacatggtaaaagactcaaaaagaccccttacgaaaggggtctttttgactagtttcttctattataatggttcctgcttcaggtcgggcggacaagcgtatatgtcttcccgagtctggcgtattcattccccgcgagccttgccgcaggcttcagctcatctgtccgtatgtagcctttatcggcgtcatatacttggtcattcaaatgaaaacaaacgactctgccgatgatgaggtctgtcgtcgtttctccgctgtcattttggaacggaagatggcgttcgagtatacattcaaacctcacttttgcttcttttataccgggaacgctgatgcaagcgctgtctgtcacagaaaggtctgtcatgccaagttcactgacatcaggatcaagccttgccgccgttttgttaatgtcttcaataatggactcatcactgacgtgcactacgaattcccgatgagcgagtgcgtttctcgcggtgtctttctggcgaccgtccgcgcggctgactgagatggccagaagcggcggttctgcggagacaacgttatagaaactgaagggcgccgcgtttacggcgccgttgatggatgaccgcgtagtgacaaatgcgatcggccggggaacaactgtgcccgaaagcaatttgtaagtgtcttttgcgttcagttcgtctgctcgtaagatatgcatgatttcggccgcctttctttatcgtatgacctgattatacagaaagaaaattcggaaacacaacaaaagaaaaccggctgcatatcttatcacgtggcatatatctgattgaggaaaaaggcttccgtttagccggcagcctatttacgaatggtgttacttgtagtttttctttacaacccagatgttcccgtctttccagtactctgttttgctgcagtaatcgtcttttttgcaagggtcttttttctgaggacgataaggttttttctgcgtgcgttttttcttgcggcggcatgatttcttgtggctgcgagattttttgtgagaccggcatgattttttacggctgcgagattttttgtgagagcgggattttttatggctgcgagattttttgtgagaacgggattttttatggctgcgagattttttgtgagaacgggattttttatgactgcgagattttttgtgagaacgggattttttatggctgcgagattttttgtgagagcggcacgattttttatggctgcgagattttttgtgagagcggcacgattttttatggctgcgagattttttgtgagaacgggattttttatgcttgcgagattttctcttcttactgctttttggttcttggtacaaataatcttccaatccctcggtgcttgcggactttactgcttcttcgatatcagaatgggaatagtggcccattttgaaacctcctcatgatatatgttttaaggatgcgatccttactaccacatagtacgcatgaatgaaaaaagtgtatgtgtgattcgctgagttttatataaaaagcacagcctaaattaatacagggaggtttaccgatgaaagaccaatcaacattgcctctataccagctgtttattcacccgaaagacttaatggagctgaaaaaagacatttgggatgatgatccggtgcccgcggtgctgagagtgaatcaaaaacggcttgacattgatctggcgtaccgcggctctcatataagagattttaagaaaaaatcgtatcatatcgctttttattcgccgaaaacatttcgcagggcgaaagagatacatttaaacgctgaatacaaagatccgtcgatgatgcggaataagctgtctctcgatttcttcgcggagcttgggacgctgtcaccaaaggcgaatttcgtaaccctgcaaatcaatggcagacatgagggggtgtatcttgagctggagtcagtggatgaatattttctggcgaaacggaatttggcggacggggctgttttttacgcggttgatgacgacgccaatttctcccttgtcagtgatctggagcgggatacgaaaacatcgctcgaacttggttatgaaaagaaaacgggaacgaaagaagacgatttatacttgcaggatatgatctataaaattaataccgtgccgaagtcagagttcaagggggagatcgtcaaacacttggacgccgataagtatttgaggtggcttgcgggcatcgtgtttacctcaaactacgatggatttgtccataattacgctttgtaccggaatcatgaaacgggactttttgaagtcattccgtgggattacgatgcgacgtggggaagagacattcatggtgatcggatggaggccgattatgtcagaatacaagggtttaataccttgactgcaaggcttctggatgaaccgtatttccgcaaagcgtacaaacggcttttggaagagacgcttcagacccggtttaccattgaacatatgaagccgaaggtcatgtcactgtatgagcagatcaggccgcatgtcgcgaaggatccatataagaaagaagagattgattgctttgaccgggagcctgaagtgatttgcgaatacattaaggagcggtcagccttcatcagcagtgagttagagcggtggaatatctgatttggaaatgaagaaagattttttacaaataggctggtgaatcagttcccgaaaataatcgtgatacgtatatatgcattatgctttttacattatgagaaaaatgactaggaggacaatagatgaaacgcaatacgaagcggcagcggtctgatgacaactttttgcatgcaatggaaggaaaagtgattactgtctaccggggaggcccggagtccaagacagggagattagcagacattcaatcggattatatcgctcttcaggttgataataaaatcgtttattatcaatggaaacacgtgaaaagtgtgacggaaaatacgagtgaaaccgtatcgccggccgaagcggcagaatgtgaaaaagctgatgattttcaagacctgatcagccggatgaccaatcgcacggtgcaattgaatcagggaggtccggaatcgaaaagaggaaagcttcacgaaacaggggatgattttctcgtgctggaaacagaagatgacggaattgtatattttaacgccgaccatgtcaaaagcatcagcgcggaacaagaagagtacggccaagaggaggagcgcccggaatttgaaatggctgatgattttcacggcatatttaaacgcctgatccacaaatgggtatccatcaaccgcggaggtcctgaagccgttgaaggtatacttgtggataattccgacggccactacactcttgtgaaggataaagaagtgctgcggatctatccttttcatatcaagagcatcagcgaaggggcaaaaggagcagctaaaaaagaggagaataaagacgacgagaataaaggtgagaaagagagcgccgaagaagaaaagccgcatgaagaagaatcacgcgaagagcagcgtacttcctctaaaaagtcgaaaagatcatcaagatccgttcgatcctcaaaacgggaggaagagaactcttatagctacgccactgtattaaggacaatagattatcggtggaaacacggccgtaaatgattggaaagattgtccgtaaacgcgggagaggggggaatgaaatggctggattaagcagatttctggataaacaagtcgatattgagatatcggggaatacgacattttcaggaactcttttggatatcggtcaggatatcattgtgattcatgacggccggacgtttctttatattccgctgctgcatcttcagaggatgacattgacgctcccggacgaagagaataaagaaccgtacgcaagaaaaaaaagtccgcatcccgaaaaacaggaacattccttttcttaccggaataccctccagcatataaaaggcagattcacagaaatatttgttacgggagaccgttccattcatgggtatgtgacaagtgttttaaatgattattttgttttcttctctccggtttataagactcttttcatctcgatgcatcatttgaaatggctgacaccctattccgatgagcagacgccgtatacattaaacagttcagagctgccggttgttcccgctaatgtgccccttgtccggaattttgaggaacaattaaaaagatatatcgggaagctgattattctggatttaggagatataccgaataaagtggggctgttgcaggatgtctcagataatattcttgaattgaccaatgcagacggcgatactgttttttggaaattgaatcatttaaaaaccatgcacctgccataaatgataaaactgcctctcttatacagcaggcagttttttttcatgggagctaaaggtaaatccaactgatccaaacatataaaacggtaatggtaaacacgacagtgagagggacaacgataatggtcgttttgatatattctgaccaagaaactttttcgccgtgctgtctgatgatatgcatccagatcagcgtggctaatgtcccgatcggcagaagcaatgatccgatatcactgccgataatattagccagataaatgatttttacggttaatgggtcgatggacatttcagttaaggtcaaagtgctgatcattaaggcgggatggttattgaacaaattagagaggacggatgtagcaatgcccataatagatgcagcgtgggcaatgctttgtgagacataaggctcaatagactgaacaagcagcgccgtcagtccgatattatgcagtccgtagatgataatgtacatcgtgaaggcaaaaataaagatatgccaaggcgctttccttaataaatctgccggtccgatttttaaataaaaccatctccagccaagcaggatgactgaactgatgacagccacgagcgaaacggatatgccgttgtaagaagctgcaaacagactgatccggacgaacaatacaaatgccaaaacacaaaacatgatgttcgtacggctgttttgggtcgggtctggcggaggctgaagcggatgatatcgtttgtgttccagcgagtcaaaatgaaccggaatatcggggagctgtttcggcaaacggcggtaaaaaacggcaaacagcagaaaggccataaacaccagtcccagcgtgccggggataaacatcatattggtgtacaaataaaggtccatgcctatcattttgagagaaattaaattgacgatattactgacgccgatcggggtgcttgcggctgtcgcaattaatacgccgcttattaaatacggtgttttctgatgtcttttaagtccgagatattgtaagaccaatagtaaaataggagtggtgattaagacgctgccgtcattattcagaaagagcgtcattgaaaaacagagcaggttggtcagccaaaaaagccgaatgcccgatcccttggcgcggtgaagcagtttggccgccgcccagttaaaaaaaccgaagctttccagcgcgattgccataatcattgtggagataatggttattgatgctccggtgacttttgaccctatatcccccaaatcatgaaaggaaacggttccgcataacaaaacgagaatggcgcccagcgacgccggaacggcttcatttaatcccccgggtctccaaaatataaaaataatggtcacaaagaaagaaatcagggtcaaaatgacggtaatatgtgtaatgtgttctgcctccttttagatgggtcattgccgccccgttatttttatccctcctgatcagttgtactgtatgtatacgggtacaggtcgtaaggtgtactgagcgtttctaccaatttagtaaaaatccataaaagcacaaaaaaaagaggctgctttcggcggccctcttttttatgcattttccttatccgcctgcaataaagcctggcgtttattcataatatccagaaagtgtttcagaatcggattttgattatccttgcggtaggcaatgacccattcggccgtgagctgcacctgattaatgccgcggtaggcgacttcgagattaaacagctttttagcagaagaaggcacgaaggttacaccgatgccggcactaaccaatccgatcaccatttgatactccgtcgcttcctgaacgattttcggtttgaagcccgcctgctcgcagtagtttacaaactctaggtataaagtcggccatgtttctttcgacagtgtgataatcggttcattttttaaatcctgaatgtcgattgtctgtttagcggtaagcgggtgctgcttcggcaaggccagaatgcacggactgctctgcaccttttccatatgtaacgcggaatgctgtaaaggcggatgaaggatgccgatatcaatgttccccttcagaagttcttcctgctgtctgaaagaagaaatttcacgcagatcaagcttgacggaggggaatttttcgcggaattcccgaatgatcggcggcagaaattcatatgtggccgagccgacaaaaccgacgacaaggcggccgagctctccccgcgccgttctctgcgccatttcaatcgctttgtctatttcttcgatcgcgtttctgctgtgttttaaaaaactttctccggcagctgaaagctctacaacccgtttcgtgcgctttaataaggtcacgccgacttccttctcaagctgtttgatctgctggctgagaggcggctgtgtcatatttaaccgaagcgcagctttgccgaaatgaagttcttcggcaacggcaataaagtattgaagatggcgaagctccatccttatccattcctttctctttgttaattattcgtgaaacatattaatcatacggcgaattgatattggaggtcaatttccaaagagtgtatagtgaataatatcacaaattacttaaaattttatatttaatatgcataataaggagtgagggtgttggcaaaagcaacaaatgaactaaaaacctctggaaaaaatcggggggcggagcttgttgttgattgcttagtggagcaaggtgtcacacatgtttttggcattccgggtgcaaaaattgatgcagtatttgatgcgttaaaagataaaggacctgaactggttttatgccgtcacgaacagaacgctgcatttatggctgcggctgtcggaagactgactggaaaaccaggcgtttgtctcgttacttcaggcccgggggcatccaacttggcgaccggcttgttaacggctaatacagaaggtgatccggtagtggcgctggcgggtaacgtaattcgcgcagaccggttaaaacggacacaccaatcattggacaatgcggcgctatttcagccgattacaaaatacagtgtagaagtacaggaaacagggaatataccagaagcggtaacaaacgccttcagggcagcgtcagcaggtcaggcaggcgcggctttcgtgagctttccgcaggatgttgtgaatgaaatcacaaatgtgaaaaacgtacgcagcgtgccggcgccgaaacaaggccctgcaccggaagaagcggtcagcgcggctatcgcgaaaatccagacggcgaaacttcccgttctgttagtcggcatgaaaggcggaagaccggaggcggtaaaacaaatccgcaaactgcttgccaaaacaaaactgcctttcgtagaaacgtaccaaggggccggcacattgtccagagagctggaagaccaatatttcggccggatcggactgttccgcaaccagccgggcgatcttctgcttgaacaggcggatgtcgtattaacgatcggttatgatccgattgaatacgatccgaagttctggaacgtaaacggtgaccgtgctattatccatcttgacgaaatccaggccgatatcgatcatgcctatcagccggaattagaattattaggcgatatcgccgctacggttaaacaaattgaacacgacgctgtgacatttgatatgggcagccgtgaacaagaagtgctgagcgaattaaaacagatgctcacagacagcgagaaggcgccaagcgaccataaatccgacagagtgcatcctctgcaaatcgtccaagaactgcgcaatgcaattgatgacgacgtaaccgtcacttgcgatatcggttctcacgcgatctggatgtcccgctacttccgcgcttatgagcctctgaaactgttgatcagcaacggcatgcagacattgggtgtagcgcttccttgggcgattgccgccacattggtgaatccgggtgaaaaagtcgtatccgtttcaggagacggaggattcctgttctctgcaatggaattggaaacggcagtccgcttaaaagcgccgatcgttcaccttgtatggaatgacagcacatatgatatggtcgcattccagcaaatgaaaaaatataaccgtacatcatgcgtagatttcggaaacattgacatcgtaaaatatgcagaaagcttcggcgccaccggcttgcgcgttgagtcaccggaacagctggcagacgtgctgcaaaaaggcttgaacacagaaggtcctgtcatcattgacattcctgtcgattacagtgacaatgtccatttatcaagcgacatgcttccgaagcaattcaaagaaaaaatgaaagcaaaagctctctagcactctgcgcaccatgacctgttttctaaaacagcccaatttaaaaggagtgaagggaatatgaaaaacgcaagcgacatccatatgatgagccgcggagaaaaaggctcacctgaggatcagatctatcaagtatcaacaatgacatctctgctggacggagtatatgacggagattttgatatggctgacattccgaagttcggtgatttcggaatcggcacgttcaacaaattggacggcgaattaatcggatttgacggagaattttaccgtctgcgcggcgacggaacggctacgcctgttaaaggcggagacctgtcaccattctgctcattcacatttttcacgcctgatatgacgcatacgatcgacggcgaaatgacccgtgaagaattcgagcaggaaatcgccagccttctgcctagtaaaaacttattttatgcgatccgtttagacggcgtatttaaaaaggtgcagacaagaacggtagaacgccaggagaaaccgtacgttccgatgatcgaagcggtgaaaacacagcctgtgttcaactttgacgacattcagggtacaatcgccggcttctggacgccggggtacgcaaacggcatcgctgtttccggatatcacctgcacttcattgatgaaggacgcaattccggcggacacgtatttgactatgtcattaaagattgtaaagtgaccatttctcaaaaaatgaatatgaacctcaagcttccgaatacggcggactttttcaacgcaaatttagataatccgaattttgcgaaggatatcgaaacaaccgaaggaagcccggaataaattaaaaaagaaagccccatttttctcgggggctttctttttatttggctgaaccggcaaagattaggtaaaatacagtcaaaagggaaaggtgtggtagctgtgaaagtattggtattagcggttcatcctgacatgaacaactcagcggtcaataaggcgtggacagaagaattaaaaaatcatgatgaaatcacggtccgtgagctttataaagaatatccggacgggaaaatagatgcggaaaaggaacggcagctgtgtgaacagtatgaccggatcgtatttcaattcccgctgtactggtacagtgcgcctccgcttttaaaaacatggatggatcatgtgctggcgtatggctgggcttacggctccaaaggaaaggcgctgcacggcaaagaattgctgctggctgtttccgtaggtgccggagaggatgcatatcaggcaggcgggtctaaccatttttcactgagcgagctcttaaggccgtttcaggcaatggctaattttacgggtatgacctatttgccggctttcgcgatgtacggggttagcagcgccgatgctgcggctatccgtgacaatgccaaacgcctggcggattacataaagaagccattttagagtcgtatgcattcatcttcatccgacaatatttcctgagaaatatttcgaaccttagacgtttctgactgctcaagaaagaaaaaacggatttcgcgctgaatttgcgaaatccgttttgatattatgtcagtttttgcagatcttttgtgctgatatatcccgttgcgcccccgtaatcgacaagcgcccagccgaagtcaatgccgccgccggctgtctttttccatccgaggaaagaaacgctcgtgtttttagcaagggaagctttgaccgcttgtttgtctgtatatacttttgtttttgccgttgtttttacggttgttgcttctttaacaatataatgagtagatacaaatcctgtttttccgtttttataatgtacttttgcccagtcagcgttctggaatgaaacgatctttaagctgtcgcctaaatgaagggtatcagctctcggactggctgctgatgcttttgttctgacgttcaatgcttccgcggaaacgagataagagtcaagcgggtagctgtacagatcgtcaattttgaccgcttcttgcgcgtgtgtctcgggaagaggcgttattccggcagctgaagccgctgttattcccgctgcaagggtcagaatggatgccgctttggctgttttcttcatctgtatctctccttttacttcatcctttcacgttttaccggaagtctaaacatcggccggttatttttgtgtttgaagtttcaatggagcggaaatggtttttttgactttttctcctttgagcacctgctccgccgcttcggccgccagttttccgatcagctccggctgctgggcgaccgtggctgtcagctttccgtttttaatggaagaaatcgcatctttatttccgtcgaaaccgacgaccagaatgtgtttgcctgagctgttaatcgcttcgagcgcgccgagtgccatttcatcattatgggcgaacacggctttaatatccggatgtccctgcagcaggttttccatgacggtcaatccttttgtacggtcaaaatccgccgcttgctttgttacgacatccagctttttgtcggcaatatgatgaaagcccgttccgcgttcccgtgtcgcggatgcgcccggcaccccttgcaattccgccactttggcgccttttccgagctgatcggcgaggtagtcagccgccatttctcctcctttgacattgtcagaggcgacaagcgtttcgactttgccgtgttcggctgaacgatcaagcgcaatgacgggaatgccgagggaatttgccgattcgacggctgttgaaatcgctgatgaatcggtcgggttgatcagcagcgcatcgactccctgctggatcaaatcttctacgtcatttgactgtttagatgaatcattttgagcatcgacaataatgacctgcatgccccgttttttggcttcctttacaacgccttcttttaatgaaacgaagaacggattgttcaatgtggagacggagagcccgatagtgaattcttttttatgttttgtgtttgacggttttgcccattgtggcggttcaagtgaacaggcggacagcaaaaacagtgataatgccgcgatcgtgatgatggctttcttcataatggtcctcctactatgccgattttttgcggtccagcagcaccgcgattaaaatgacgattcctttgacgacgagctgataaaaagatgatacgccgagaaggttcaagccgttgttcagcgtaccgataatcaaaaccccgatcagcgtaccgatgatgcgccctcgaccgccggacaggctcgttccgccgagaacgaccgctgcgatggcgtccagctcatatgattccccggccgtcggctgtgcggaatttaagcgtgatgtcagaatcgctcccgccagcgccgataataaacctgtcagagaatagatcatgatcttgatgcggggcactttgattcccgatatcagcgccgctttctcattgccgccgatggcgtatgtccggcggccgaacggtgttttgtgcagaagaacccacagggccgcaaatgcaatcagcatcgtaatggcaggtacgggaatgccgagaaaataaccgcgcccgaataattgaaatgcgtaacttgaaccgagccccgtaatcggatttccgtccgtatagacgagggtcagtccgcgaaagacggtcattgtcgccaaagtggcgatgaacggcgccatttttccttttgtgattaataatccgtttatcatgccgagtacggcgccgattacgcagccgatgatgacggctaagatcggatcgatgcctgagaccatcatacctgcgaccaatgcgctcgataaggcgaggatcgctccgacagagagatcaatgcctcccgttaaaatgacaaacgtcattccgaatgcaatcagagcgttaatcgcaacctgccgaagaaggttgagaatattgaggggttcaagaaaactcgggtttaaaacggaaacgatcagcacaagaatcagtaagccgagaaacggaccgagtttttgtgtgaaggtgtgaatggaaaatcgcttttgttcagttgatgtcattggttcagttttcatactgctgccctcccgtggcaagtgtcatgatgtgttcttgtgttgcgccggccgcattgatttctccgctgatgcgcccttcgtggacgacgatgattctgtcactcatgccgagaacttccggcagctcggaagacaccatgatgatggcgactccgcgatcggtcagttcattcattaatgaatagatttcccttttcgcgcctacgtcgacgcctcttgtcggttcatcaaggatgagaactttcgggccgattccgatccatttggcgatgacgactttttgctgatttcctcctgataaatgccgggcggcggtttccggagatgcggtcttaatggtcagacgcttgatgagcagctcaacgaactccgcctcgcgttttcggtcaatgatgcctttcggagagaagctggtcaggttcggcaatgagatattttcacgaatggacgtatccagcagcagtccttcatctttgcggttctccgtaatcaggccgagtcccttgcggatggcatcgtacggaccccgaatgccggtttttcggccggaaatccagatctctccggaatcgagcctgtcaattccgaacagcgccctcatgatttctgtccgtccggcacccattaagccggaaacgccgaggatttctccggcgctcacatggaaactgatctgtgaaaagcttcctttttttgaggcgtttttcacttcgagcaccttatcgccgagtgacggcgtgcgagtcggataccgatcggtcagctcccgcccgaccatttttttgaccacttcatcaaaattagtttctttcatatgcgccgtatcgacagtgaggccgtcccgcataatggtgatccggtcgcaaatcgaaaatatctcttccattcggtgcgaaatatagacgatggatacgccgtcccgctttaacgccgtcatcacgtcaaacagtttgctgatttcccgttcggtcagcgccgcggtcggttcgtccataataatgacttcggcgtttgtcatcagcgctttggcaatctcaatcatctgctgctgtccgacggaacattgtccggcttcccggtcaagaggaagagagactcccagtttttcaagctgtgattttgctagcgctttcattttcttcgtttccaaaacgccgaacgccgtcgtcagctctttgccgataaaaaggttttcaagcaccgtcatgtccggccatatattcagttcctgatggataaaggcgattccgtgcttttcggcttcctttggattggagaagctcatatttgttccgtttatcgtaatgtttcccttgtcgagccggtagagcccggtgagcagattcattaacgtcgatttgcccgctccgttttctcccattaaagcgtggatttctcccggcagaagctcaaatgagacgccggaaagcacttggtttttgccgaatgctttatgaatgtctgtcatgccgatgtgcatgctggatcccttctttctagaaaatcacacccgcctgcaggatgcagttggcgtatggtgtcatttcacccgttcggatgacggcttttgctttctgtgtgagccgtttgaattcctcgtgggacatgtactcgatcgtctgcgctgagaaatggctttctatgaaacttgcattctcggggtttgcgtctttgatctcggaagcggcgatcaccttttcgactgccatctccccggctaccaggctggtcacgtcccgaaaggcgggaacgcccgccattaaggacaaatcaattttagggacaccgtcagggacggggagacccgcatctgcgattgcgatgaggtctgtatgccccagatcggccaatactttggcaatgtggctgtttaacattccgtgttttttcatgacagcagctcctcaacttcttttctggccggcatgccgccttgggcgccgaagtgctgcacggacagggaggcggcgcggttggcaaacaggagcgcttgctcaatgtcccgtccttccgcgagtgcgacggcaagtgccgcattaaaggtatcgccggctcccgtcgtgtcgaccgcttctgcagggaaggcgggaacaagccgttccgcggtgccgtctgagtagcgcacgccttgttttccttcggtaatgaacagtttgccgggatagccggcgagcgcttcttctttcgtccggtcaggaaataaaatggacgcttcatgttcgttcggcgtaagatatgcggcatcctcaatcgtcgattgtttcagcggccgggccggcgcgggattcaggataaccggaatttgctgcgcgcggcagtagctgcacacttcttcaacggtttcttcaggaatctcctgctggatcagcacgatatcaatgccgggaagttttgccagcgcacttttggcataatcgggggagatgtcatcgtttgcgccttttacgacgacgatgctgttgtctccttctgcgagcacaatatgagccgttccgctttttttatgtgtaaccgtttccatgtagtccgtattgacaccgtttgccttcaggttttcaataatcgcttttccgtagctgtcacttccagcttttcctaccatatatacgtttgcgccaaggcgggaagcggctacggcctggtttgcgccttttcctccgggcacggtttgaaagtctgtgcccagtacggtttctccggctttcggacgccgttcggatgtgacgaccagatccatagaacagcttccgataacacaaatttcactcatggtgatcatcctttctcgtcgtttgtcttcgtatgtaagtcacgggcagttgaatggccgtctctttcggcggctctttctttatcaattgcagcagcaggtttgccgcttgttttcccatctcatatgcaggctggcggatggttgaaagaggcggaaacaaaagcctgctctgcggaatatcgtcgtatccgatgatctgaatctcctccggaacttttttgccgagccgcagcgcctcatggaggacggcagccgccgcaatatcgttgctggcaatgactccgtcggtttccgggtatactgcaaacaattcttctgctaaaacggcagcatccttgatggaaaatgaagcggcggagatgacattgaactgaacgcccgctttttgcagcacgttaagtgcgccgttaaaacgttcctgagcggtcggaaggtgggctgggcctttgacaagcgtgatgcttgtgcttttgccgcgaagcatttcctcagccgcccgttttccgcctgcccgcccgtcactgaatacggatggggcgccttcttttgtccggtccagaaatacgaccgggtaaaggctgccgctgtattcgggaaggtcggggtaatgggtggccgccaaaataccggcaacttgattttgtttaaatgtttgcaggtagtcgagttctttttccaattcttcatcgctgttgccgatgatcagccggtatccttcccgctgcaactcgtcttcagcgccgcgggcaagctgagggaaaaagggattcgtaatatccggaagcaagagcccgaccagtctggattctcttttataaagagagcgggcaacttcattcggataataattcagcttctccatggcaagcatgaccttcgttcgtgtatcttcatgcacgtagccgttgtcattgaggacacgtgaaaccgtggcaacagagacgccggcagcgcctgcgacatctttaatcgttgccaacaaacactcctccttcaactgtgtaaccgtttacataaaaagagtaacacgaatcatttcggttggcaacaaaaaaagagaccggggtctcttttagttcacgatgccgatttgtgagatattcactttgatatcagggatgatctcgatggaaggatagacctcacgccaattgagccgcttgccccgctcataataatgggtttgatatttccggccgatgccgaggatatccgagttgtgctcctgaatatggctgatcaccgatctggcctggctgttcaaatttgctgaggcttgtttgttcatttggtcgattgccgtataagaattcagcttgtcctttggatattccaagacgcgtgcattcagttttaaacggattttcacttttatatgctgcggatctgtatctataaatacaatctttcgcgtggcatccgtgatgccgagagaaagataattttcaatatccattttgtatttgtcccacagcttcagattaatattagccgatttattaaattgcccgcttaaaagggtcaggagggttgaatcctgaccgagcacctcagtcactttccgctggccgctgaacagggcagaaccctctatctttatcgtctgtccgttaatcgataaataaggtagggcgaaatccttatcagccgtcagcatgcttgaacggatggattgcaaattctccatgctgatatttgattccgcattagcgcttgttaataaattcgttaaatacttgctgacgatcaatttctgccggacgatcagcttcagcacttcaatcgcctcgccgtcttttacaaccgccggatgagcgagaagcgggcttttcggatctctgtaaaagacatcgagataaggaaaaagcggtttttccgccattttctcaccgattaataagactctttgcttggacgtgtcaatgcgctggtcgacaagcttatccaattgaaaccgcgcttcacggatggtgtgcccggaagcgctgagcaccgtcgtaatgaatgagccgcccgtttcctgttccgcctgggaggactgaaccttccgataggtgatgccgattttatttttaccgtcatgatcaacatcaaggcttgcggtcagcacgagagaaatatctttcagcaaattttgatcccagcagcccgcaagtgtcaggcttgcgcacatgagactgataagaaccgcttttttaatgcgcatggcggacaccctttttgcgtacaaggataatcaataccataaacaaaggaaacaaatacacaaacacaatatcggaaatgcggaaaaactgatccagctgctgtatcgttttatctgtgcttgtggcccaaatagacagaaggaagacgagcagggccagcggataaacaaaccggctgtgatctttttgattgaacagcttggcaatgccggtgcttgccaagtaaaacacgttggccagcgttgaaaagacggtcacgaaccaaaacgtcaaaaagagcagatccgtccgttcgataattctgaatgaaacggtttttaacaggtacagcacaggctccgggatcatttttatttcttcggggctgattgtgacaaagcaagtaagggtgatatacaggtaataaaggataatcaagatgtttgaaatcgtcagtattttgtagcgctggctgacggtgcagttgattaggggcccgatcacgagcgccgcctgaaagccggtaatgctgacaagtgtttgctgcaccccggtaagcatgtcttttgcggttccgtgaaaaatcggcataatgtatgtgatatcggcttttcccagcgtgtataaaagcggcagagagatcagcagcaaaaacggcgttaaaataaagctgaacctggcgatcgcattcagcggagcctgggcgatatagacagaaccgaggatcagcattaagctgatcacccaattcggagtctgagggagcacccagatatccaatatccgtgtaaatacagaaagaatgagcgtgcagagaaacgcgaaatataaaatatacagcacctgcacccctttgccggcaagtgttccgaacacctcctccagcatttcgtacaggttcagcttcggaaaccggtgaaataatatcatatacaggctgaatgtaagctggacgagcaatccggtaagcagaatggaaatccatccgctgcttcccgatttcatcatcagtaaatggggcagcgccaaaatgccgatgctgatctgcgtctgattaatgaaaaacacgccttgaagccggctgatttttttaggcttcatcttttctccacccccgaacatgtttcatctgctttgagtcttgcggtctcaaataaaaaggccttcttttaataaaccaagccggcagccggataaatgcatccttcaagtcactgaaatgaaacggcgtcaacgatgataaataaggaacgccgagtgattcaagcttgcacaggttcatcagaataagcccgaagccgagtgcgatgccgataaaaccgaacgaggatgccagaaacataagcggaaatctgagcgttcggatggacgtgctcatttcatatgaaggaagcacaaaagaagaaacagccgtaacggctacgacgataatcatcatattagaaatgagtcccgcctgaacgactgcgtcaccgatcacgagaccgccgacaatgccgatcgtctgactgatcggtctcggcagcctgataccggcttcgcggatcagttcaatcgtaatttccataatcatggcttctatcagcgggggaaagggaatatcaacaatcgaatttttcatggtgataatcagatcgttgggaatgacttcaaaatgaaacgcaatcagcgcgatataaaaagcgggcagcgtaatcgcgatcataaaggcgaaaaatctcagcactcttaaaaaactggcggaaatccatctcgtgctgtagtcgtccggagattgaaaaaaggaaaagaatgtgatcggcgcaatcaaagccgacggactcccgtccatcatgatcagtacacagccttccatcacgcatgcttttgctttatccggccgttccgtatgaatgatctgcggaaaaatggaaaacgaattatcttctattgattcctcgataatcccgggcgcaagcacgctgtctatacgcaagtatgacaggcgccgcttcacttcctccacaatctccggattggcgatattctcaacaaagataaccgcaacttttgatttggctctttccccgatatccatataatgaacggagagatggcggtcctgtatgtgaaaccgcagctgatgaatgttcgtttccaaactttccacaaacccgtcatgggcgccgcggacgatactttcagattcgggttccataatggaacgcagcggattctggccgacggaaaacagcttcgctttcctcgatgcatcgctgagaaaaacaacctgtcctgccaaaatcccgtcaatgagttttctgatttcatccgtttccgcactgctgacggcattcatcgtttcctcaagcgggccgttctgcagggtgtcgcttaacagaaactcattcagcttctgttcttctatcatctgttcaatataaaagaaagcggtatgacggtcctgcagtttgatccttcgtattttaaaatcaccgcaaacacacatcagctcctgcatttcccgtacagccgattcaaaatcgccgggaatccgtttgttttgtttatccgcagacatcagaccgcctcctttcctggttatctgtagttttcagcgggtattccttttttatgcattttataaaatagaggagttcctcgatgttttaccaagaacttcacaattatggatgaatatttcttgaacgaatataaagatttattaaaattatttcaaaagagtgataaacgtcctgtaaatggtttaaaaggagaaaggctttccgcatataaaatgtgtatttcttgtaaacactccggacccgtctttttctgtcatgtatcagtcattccgctagttattttggaatgggactgaaagcaggatacgggggaaaaatgaatgactttaagaccttatccttaacaaaacaggcagtctgcacacagcggacagagagtcccaaaacgtatgcgcagtgcgaaaaccgctgatacaaacgggctggaaaagatggattatcattacatctttttcttccggaacgcgaatagttccattggtccaaatgaatttctgcgcgaaaatgtaaacgcattcatttttcttttgaaaaattgaagtaaggttgaagtcctgcctattcccaaaaaaagcaattcgataataggaagaatagcgtcactaatagagaagtttggctcagtgaaagcgggaagattatgttacataatgccgattgagaattcatagtgaagctatatactgatgaatgaatttatcaatacagaaggagatgtcaaaaatcaatgtggttactcattatagcctgtgctgccgtactaatcatcggaatcattgaaaaaaggcggcatcagaagaatatcgatgctctgccagtacgcgtcaatattaatggtatccgcggaaagtcaaccgtaacgaggctgacgaccggaatactgatggaggcgggctacaaaacagtcggaaaaacgacgggaacagatgcaaggatgatctattgggatacacctgaggagaaaccgatcaaacggaaaccgcagggcccgaatatcggcgagcaaaaagaagtaatgaaggaaaccgtagaacggggcgccaatgccattgtcagtgaatgtatggcggtaaacccggattatcagattatctttcaggaagaactccttcaagccaacatcggcgtcatcgtgaatgtgcttgaagaccatatggacgtcatggggccgacgcttgatgaaatcgctgaagcatttaccgcgacgataccgtataacggtcaccttgtcattacagacagtgaatacacagacttctttaaagaaaaagccgcagagcggaataccgaggtcattattgcggataactctaaaattacagatgaataccttcgaaaatttgaatatatggtctttcctgataacgcttcccttgcgctcggcgttgcccaggctcttgggatagatgaagaaacggcgtttaaaggaatgctgaatgcgccgcctgatcctggcgccatgagaatcctgccgctgctcagcacgaaggagcccggtcatttcgtaaacggctttgccgcaaatgatgcatcttctactttaaatatatggaaacgtgtaaaggaaatcggctacccgacagatgaaccgatcgttatcatgaactgccgcgccgaccgtgtggacagaacgattcagttcgcaaacgacgtgcttccgtacattaaaacgaaggaactcatactcatcggcgagacgacagaaccgatcgtcagagcttatgaagaaggcaagattcctgccgatacattgcacgacctggaatataaatcaacagacgaaatcatggacgtgctgaaaacaagaatgcaaaaccgtgtcatatatggcgtcggcaatatccacggttcagcggaaccattaattgaaaaaattcaagagtataaggtgaaacagctcgttagctaggaggaaaaggataaatgttcggatcagatttatatatctcacttattttaggcgtgttaatcagtttaattttcgcggaaaaaacaggtatcgtacctgccggtttagtcgtgccgggttatttagggctcgtttttaaccagccggtctttattttactcgtattgttagtgagtcttcttacatacgtgatcgtcaaatacggtttatccagatttatgattttgtacggacgcagaaaattcgcagctatgctgataacgggaatctgcttaaaaatcgctcttgatttcctttacccgatcgtaccgtttgagatatcagaattccgaggaatcggtatcatcgtaccgggtctgatcgccaataccattcagaaacagggattaacgattacatttgccagcacgctgttcttaagcggcgcaacttttgccattatgtttgcttactacttaatctaatgtaaggtgtgtcaaacgatgaaaaaacaattaagctttcaagaaaaactgctgaagctgaccaaacagcagaaaaagaagaccaatcttcacgtttttatcgcgctgccgatcgtcttttgcctgatgttcgtctgcatcctgacagggaaggcggaaacgccgagtgtgaaaagaaatgccgatgaccttgtatcagcctcattcgtcggagatattatgatgggccggaatgtcgagaaagtgacaaagcataaaggcacggagagtgtcttccgttacgcaaagccattcttcgaagcatccgactatgtgtcggggaactttgaaaacccggttacatataaaaagaactacaaagaagcagaaaaaaatatccaccttcagtcaaacaaagatgccgtaaaagtattgaaggacatgaatttcaccgttctcacggcagccaacaaccatgcgatggattacggccctcaaggaatgcgggatacggttgaagagttttcaaagcaaaatcttgaacttgtcggcgcgggcctcacgctgaaggaagccgagcagaacatttcttatcaagatgtaaacggaatcaaaatcgcaacactgggtttcactgatgtttccggaaaaggctttgcagctaaacgaaatgcgccgggtgtgcttccggccgatccagagctgtttattccgatgatttctaaagccaaaaagaaagccgatcttgtcattgttcaaacacactggggacaggaatacgataatgatccgaatgacagacagcgccaattggcaagagcaatgtcagatgccggagcggatattatcgtcggacaccatccgcacgtgctagaaccgatcgaaatgtaccacggcactgttattttctacagcctgggcaacttcgtattcgaccaggggtggacaagaacgagagacacggcgcttgttcaatatcatctgcagaaaaacggcacgggacgctttgaagtcacgccgatgaatattcatgaagcaacacctgcaccggttaaaaaaggcagcatcaatcataaaacgatcgtacgtgaactgacgaaagaatcgaatttcgattggagcgtcaaggatggaaaattaacgtttgatgtggatcacagcgatatcttaaaaaagaaagcggagtgaaaaacaaatgaaaatcattaaagcgggatggccgtttgccgcgatcattatggtatttatgtttatgtcagcgtttaaatacaatgatcagctcacagatcaggaaaaacaaaaaattgacacggaaatgcaaaagattcagcaagaggacacagcgggcgcaaaataagcgcatgattccgcttgccggcatattgtttgttccgattccagtaaagaatgcccatatcgggcattctttttttgtgtgctctcctaaacatttgttaaaagttaccgatgtaaaaactactaaaaatgaggagagtgaatagaaaacatgctcacaagctggaggaagtacatccttgccggccttatgatttgtcttgtggcacccgcagtaacgagaacggaaattgctgaagcggattctcaagtttctgtcctgatggtttcagacgcgcaaaaacttgtcggaaataaatatgtttacggaggcgaagagcctgaggacggttttgatccgtccggattgattcattatcttttcagcagacagaacatccatctgccgagaacggtcagtgatcaatggaaggttggaaccgccgtcaaagaaaatgaccttttaccgggagatcttgtgtttttcaaaaagtcagattcaacacaaaacgcacccgtccatgacggtctttatatcggaaacggagagatgatacacagttctccgtcagaaggcgtaaccgtcacacggtttcaaaaaagcagttattggatgaatttatatcttggcgcaaagcggattacaaaagatccggaactggctgatgacccgatcgttcaggaggcagcccgttacctcgacattccgtatgtattcggcggaagcacgcctgaggagggattcgactgttcggggctggtccaatatgtttttgaaaacaagcttcacatttacctgcctagatcagcggaacagcagtggctggtcggtgagaaaattaaactgagcggcataaagcccggggacgtgatttatttcagcgacacgtataaaaaaggaatttcccatgcgggcatttatgcgggagagggaaggttcatccaagcaagccgctccgaaaaagtcaccatttcttacttgtcggaagattactggaaaaaacattttacaggtgtgcgccgattcagcaatttagccatttctaaagaaaatcccgttgtgtccacagcggccgatcatatcggaatttcttatctgaaaggcggcgtttcaccggaaaccggctttgatacggcgggatttgttcaatacatctatcaaaaagcgaaaggaatcagcctgccgcgttatgcggacaagcagatgcaggcgggcgttccggtcgataaacaagatctgaagcccggcgatctggtcttctttaaagcggaaagcctgaatccggccatttatatcgggagcggacaagtgattcatgtcaccgtgtccgcaggcgttaccataacaaatatgaacacaagcgcttattggaaggacaaatatgcgggcggcatccggcttccgtaaaaatagacgtcagagagtgtctctgacgtctttttcttttaccgtttcggcgctctgtatccggctgctaccgcatcctctacggaacagaacatttccgcgggatctgtcgtccggtcgtagtatgtacttcccggcgtgtgataaatgccgttccggctgcctttaatgtcgcatccctgtgaggtgtcggctgctttcgtttcggcatgtccgccggaggaaggggcgttgttttgcgccgtttccgcgttttcggatgtttttgtttctgctttctgccgctttaaagttttattttctgactgaagcgtttccgcggtcttttcgagcttcttttgtgaattttttaatttctcattgtcttgtttgagtgatttgtttgtttttttcagctcacttatctcttggctgagtttgctgagtttttcttcattgccggcttcggcttcggatttctccttttcggccgcggcactgatgctttcatattttttctcaagcgcctggtgttccttcgtcaatttttgataagcggtatcaagggtgctgtatttctcctctgccttcacggccgaggcgtccggctctgcgagggaggcgccggtcagaagcaggataaatccgccgatgagaaggggccaaaacagcttttttgaaaaacgtttttcttttttggcagctttgcatatgaggtggaatattccgtatccgactgcgcagagaaaagctaaacatcctataatagcgattgcattcgacatcatgaaactccttttttctttatcttacaatttattttcatttttgggaatttcttttttggaaaacgtgaaaagccaggccgtgaaagacctggctttttccttttattgatcgttgtcgagaagccggttgatgaaatatgcgacgccgttttcatcgttgctttttgtaatatacgtgcttttttccttcagttcatcaatcgcattgcccatggcgatgcggtttcccgccgcttcaaacatggagaaatcattcgggctgtcgccgatggcgtaaatatcttgtttttcaattccgtacagtgaggcaagctccgtcagagcacgtccctttccggaaccggcagggaggatttcgataatgtgttttccggaagatgtctgggataatttcggatgatgtgtaatttcttctttggcgtttctcagtttttccatatcaaaagagaaacaaagaagcttgtaaacatgttcgtctccgttaaaaatcgcctgtatatcctgtacgggtttaatgccgaattgtttgaactgcgtctttgcgccctcccataatgtctgaatatcttccttgggattggcgcttttcagaatatccagttctgcctgcagtttggactcgccgtcaaatggggacagcagatgatcatctgtatagacctcaaagtaaatgtctttgtccgttaaataagcggctatatccttcccggcctgctgatccattaagagccggctgacgaggcggtatcctttgtcatggactgtcccgccgtttgccgcaatgataggaatatctaaatccttcaagagcgcttttacatcaaacgtggctctgcccgtgcagatggccacgagaatgcccgcttcatccgctctttgtaaagccgctctgttttccggagaaatcacactgtccgagttcagtaatgtgccgtctaagtcaatggctatcaatttcatatgtatggatgccctccttaaaaataaagctgcttcatgtagtatgttcagctttgtgcgaaatcagcagaaagccttcagttaaaaggctataccttcatgtcctttttttcaacagaaaaacggcgggatttgctaatcccgccgtgacgtcttacgcgtttaaatcattttttaatttcgttttcacttcttgaaggttttcctcattcagcttgaagtaataaatatttttgccgtactgaggagtgtaaatatagctgtctgaacctgtcagctgcaaagaatccaccgatttcagcgatgtgataaacgggaacagaccgatggcgtcattaagagataagttcatttttaagtttttccctaagctgtcgacgatatcgtcataagatgggatcgagcttaacgatttagattttttaataatggcgctcagcacttccatctgtctttgtccgcgcatcagatcggtgtccgctttgcgtgttcttacataagccagtgcctgctcaccgtcaagcgtctggacgcccggcttcagcacgacttttccttttgtatcgactttaatacgatcggcaactttctggcttttcacatttaccgtaacgccgttcaactcattgacgacatcgcggaacgcgtcgaagttgctctcaaccacataatctaccggaatatcaagcatgttttctactgttttataagttaaattataaccgccgtaagcatgtgcgtgcgcgaatttgtcatagccgtgtcccgggatgttgacataggaatcccgcggaatgctgagcatcgtcgctgttttctttttccggttgaaggtgacgagcacgttggcgtcacttcttgcgtcatctactgattcgcccttattgtcacgggcgtctattcctaaaagcaatacggtgaaagaatccttcttcgggtcaaattctttgatccgttttacggactggtcgccgcggtcaaggctgacgtgcgcttctttggtcgcattattcaatttcacaaatgcgtaggtgccgacggaaccggcgatcaccaataagaaagcggcgaataccagtacaaatttcacccattttctgaggcgtcttttcttttttctgcgttgagatcgttcttccatatcattacctctcgtttctattctttgtgaagcgtaccataattgttgacttggagcaactctgcaaatgagaaaattccaaatctttctctctatttcgacaacatctactgttatttttgcatcaggttcacattatattggacggcaggaagcgggaaatgtttcgtcgctttgtaaaaaataattagtaaaataatggatattaacggtgcggaaggtttgaaacggacgaaaacaggtaaaagaagcagtagaacaattccgcgcggatacagcgttggatgaagggagtctacataacatgaaaagcatacactcgaataaatggctctattttttcggcgcactcggcggcgcgttatacggatatgataccggagtcatttccggagctattttatttatgaaaaaagaactgggactgaacgcctttacagaaggcctcgtcgtcagttcgttattggcgggggcgattctcggatcggggtttgccggcaaactgaccgaccggttcggcaggcggaaggccatcatgggagcggcgctgctgttttgtataggcggtttaggagtcgcttttgccccgaatacagaggtgatggttcttttccggatcattctcggactggctgtcggaacatctacaacgatcgttccgctctatttatcggagctggctccgaagcataaacgaggggcgctttcttcgctgaatcagctgatgattacggtcggaatcctcgtttcttatatcgtgaactatatatttgccgatgcaggcgcttggcgctggatgcttggacttgcggttgtgccgtcagtcattctgctgatcggaatcctatttatgccggaaagcccgcgctggctgtttacgatcggcaaagaagagaaagcaagagaaatcctttcatcattgcggggaacgaagaatattgatgatgagattgagcagatgaaagaagcggaaaaggaaaacgaaggcggcttgaaagaattgtttgagccgtgggtgagacccgcgctgattgccggcctcggacttgcctttttgcagcaattcatcgggacaaatacaattatttattacgccccgaaaacatttaccagtgtcgggttcggcaattccgcgtctatattgggaacggtcggaatcggcgccgtcaatgtcatcatgacgcttgcggctattaaagtcattgataagatcggccggaagccgctgctgctggccggtaatgcgggcatggtcatcagtctgctcgtattggccgcggtcaatcttttctttgaacattcagcagccgcatcatggacaacggtgatttgtttaggcctgtttatcattgtgtttgcggtcagctgggggcctgccgtgtgggtcatgcttcctgaattattcccgctgcatgtccggggtatcgggacgggtgtctccactttaatgctgcatgccggaacattgattgtctcattaacctatccgatgttaatggaagcagtcggcatcagctatttatttctcatttatgccgcgatcgggatactggcattcctgttcgtccggtttaaagtgaccgagacgaaggggaaaagccttgaagaaattgagcaggatctgaaaagccgtaacggaggctcgggatcagaatcaaatcggcggacagttcatccgtaatattcagttttagggggcggttattcaccggcccctcaaaacggatgccgtgcgggcgcccggtcacataaatgacggggatatgtcatacgttgtataaagtcacgataaaggcggggatgccggtgaaaacgagtattattatccttacatataatgaacttgagctgacgaaaaaatgtctggccagcattgaacgatacaccgacaaagataagattgaactgattatagttgacaacggttcctcagacggaacgagagaatacatatcaaatctgcctgacgtcaaagtcatcctaaatgaaaaaaacctcgggttcgccaaggggtgcaaccagggtatcgaagcggcagggggagaaaatctgctgtttctgaacaacgatacgatggtcacgaaaaattggctcacctccatgctgagggtgctgtatcaatctgaaaaaaccggtatggtcgggcccgtcagcaactatgtcagcggtgcgcaaatgatccataacgcatatcaatcgcttgatgagctggagtcattcgcggaggcgtattgcgcacgggaaaagcatcatacaaagcgggtgctgcgccttgtcggtttctgtcttctggtgaaaaaaagcgtcattgaagacatcggcccgttcgatgagcaattcggatacggttcttttgaagatgatgacctatgtctgcgcgccctccaaaaaggctacagcctgcacatcgccctcgatgcctttgtgcatcaccacgggcacgcgacgtttacggctaatcaggatatcaatatcaatcagttatattcggagaaccgccagcgttttacggaaaaatggggcactgattttacgtactttactcatccgagaccggaaattgcggagctcgttccccgggaggcgaaacggatacttgatgtcggctgcggcgcgggggctacggggctggaacttcaaaacagacagccttgcgaactgtacggaatagaactgcacccgctggcggcgcaagcggcaaaaggacactatgaagcggtgctgcaggaagatgtcgaagaagtgaagctgccttatccggaaggcttttttgattgcatcattttcgcggacatccttgagcacttaaaagacccgtggcgcgtcattgaaacgtactcatcctatttgtcgcctgccggatcaatcgtttgcagcattccgaatatttcccacgccgaagcgctgtttccgcttctgctcggtgactggacatacagagacgccggcattctcgaccgcacccacttacggttttttacgccgcagacggtgcgcacgctctttccggaagagacatttgctgtgaaaaagcagtcctatacgtatgttcacgtggatgagcgggtgcagctgtttttacaggaaatcacacgaatggcgcaatcgatgcaatttccggtgatacagctgcccgaacaaagccggatttatcagattctcctccgggtcgaaaaaacaggctgaaggctaccgtcccatcgttccgaagttggtaatctgaatggaaacatcatagtcaaaggccgcttcggagaaggtctcatcccaatgatgctttactttcttccaatagtcgggatattgaatgcggactctgtcagaaaagaatacagggtccgtttcatattgattctgcagcttatcgatgacttctttcacatcgcttttcagttttttttcgaaaatcttttccagcccgtttaaatagtgctgatcgaatgaatcttctccggcatattgatcctctgacaaaagtccttttgtttttaccgctacatgaaatgacagcttcccgtttttcagcctgggagtgatggcggatgttgattttttgatctcgaaggtaatcgggtgcccccctttatccaaagcgggcagcacgccgccccgtatcgtccccatcagccaattcaggctctgtatttcgtatgatgacagaaagcccgccaatctgttttgttttgcgtttttgataatggccgctccgtcatacaccgtttttcctttttgattgctgacggcctgaatgagaaaactgagtttattatggcagtaaatcgaagctctcccgattcggagcggttttaaaatcttcccgttgtagccgccgttgttcgtaaggtcgatcagcttttccgcggccatgggctgctgctgattcggcgtcggctccgtcagaatatcggacgcttttcctcttgccgcgaagagatagctgctccgccttaattcatcatcgcggataaaatgattcatcatctgcagtatattttggtcggccagcaatttgtcgctgaatatcagcacttttaagtgatcgctgtaaacaggcggatcttttaaagcgacttcactgacggcttcaagaatggtatccccccgcgtcgtcacattgacaaacacgggccggccggaagcctggctgttttcgctttggggcagcaggttttgataggttaatttatatcggcggtcactcgtctcgtctatcgccagcccccgggcgaaagacagcttttcgacttccttcgcgtcccagcatcctgaaagcgtcatcagtatgaaaagcgccgccgcccattttatgaaaagtgtcatgacgtctttttcctcccggctatttttttcatccagctgacaaaccagatgagaaaaggaatcataatgacggcaaaaaacgcatatccgagaatattcgcgaatgcaaacacactgttgatatcatcggggtacattgaaaggccgaatgtcactgccaataagcctcccagcagccaggcattgtttttatttttcagtctgaaaatggtgtttaatccgagatgcgcccctttaaaagagccgagcatacaggtaaactgctggcatgtccacgtgattaaaagaaagatatcaaaccgctcaatgaaaatacccctgatttccaaggcatgaatcagggaaatggtcggatacgtcaccgttttggcttcagcgaccgacatacagccgatgacgacaagcagcgtaaagctgtaaaaaatgctggcgcctgcgatgccgaagacagccgcctttttcgcctgcttcgggtttttcataaacggcaccagataaagaatcacctcaagtcccgaaaaatacagaagggtccgcggaaacagctcaaaaaagcttttgtagcctccttccatgaccgggcggacgaaatccagcttaaacagtctcaaactgaatatgagcagcgtaatcagaatgacgatcgcaatcggaaacagataggcataaagctttgaaatgggatagaccccgccggtcacatggtaaatgccgaccgccagaaagatgaatatgacgacacccatcggcgtatttttcagtaaaaagtaattgatgacttcaccgagaaaacgggcttgaaaacagacggtgacgacaaaataacagctgatgaataaattcagaagagaaccgatggcgcggcccatgatgctttgattcagctcataaatggtttccccgctgtttttctgcaaaaacggcataaagagcaggacgatgccgataaacacgacactctgcacaagaataatgatccatccgctcggactgtccgctgttgcggcggagcgcggcagtgttaacacgcccgctccgatcattgttccgcttaccatgagaagtgtctgcataaacgacagcttgtcttccggttttttcatggggatcacctttgcttgattttatctttcgtctcttttctggtcggccgttttttcaaaagaggcgtcggcagtctgacgatcgtatcttttaagtcttggccaggctgcgccatgatcggaataagatagtcctgaccgaagcttttcaggcgcatcagatggccgatgacaagcagatagcacatgatcagtccgtataaacctaatatcgccgacagaatcattgaaaaaatacggatgagcctcagcggaaaattgaacgcataggagggcgccgtaaaagaagccaacgccgtaacggatacgacaatgaccatcatcgcgctgacaatattcgcctgaacggcggcctgtccgatcaccacgcccccgatcaggccgatcgtctgtccgatcggcttcggcagcctgagtccggcttctctgatcatctcgatcgtaaaaatcatgatgaacgcttcaacaaaaggagggaacgggacattcaatctgcttccggcaatcgtaaccgccattctcgtcggtaagagccccgtgtgaaacgtaacgagcgatatgtaaaggccgggtaaataaatcgtgattaaaatgcatgtataccgaagcagcctgagaaaggtaaccggaacccaccgctgattataatcgtcaggggagtggataaattcatcaacggtagccggcaccaaaagggtaaaaggcgttccatctacaagaatggaaacccttccttccaaaagagcgcccataacccggtcgggccgttcggtcgtcaagacggtcgggaaaatagaatacgtgttatcttcaataagctgctcgatcgctcctgattcgggaatgtcgtcaatggtgatggactccagtcttttcatcacttcttttacaacatcatcaggggcaatatcccgaatgtaggcaacggcgatccgcttttttgtccgttcgccgagtgtgatctctttgatctggaggttgggatcaccggactgctcgcgcaaaagcgccgtgttcgtccgaagcttttcgacaaaacctatcctcggcccccgttcaagcacttctgaagacggttcttcaatatcacgcattttaaatgtttccgtctcaaacgaaagagcttcctcccacccctccgccagcaaaaccgatttgccggagaaaatgtctgcctccgcgtccttaagtgaagaaagccgggtatgacgatagccgaaagagatggatgacggcggtgtttcagccggttcctcttgatgccgggcggccgcctgcacgggcgaaataatatattctgcaagcaattgattgtcggtcagtccgtctatatagataagacaggcgtcacatttgccgtttccgtacgtaaacgaataaaacatcatgtcatcgctttggccgaaccgttttttcagcgcttcaaggtttttgccgagctccgcatgtatcgtcacaatgttcccccctttccatcagttattttaatttgcgacaaacaaggcattttattctggaataggaaatggctgagcattccgccccatccgaatggtataatgagcaggtcagccattttatacatattgtttttaaccgcggctccctccgtgttttaaaaaagacacagggggaatgggatatgagccgctttttaaggggaggggaacgaacatgacgcaagagccgatttttttacagcctgtatgtaaagaaaaactatggggcggcacgctattacgcgaacgattcggatatgacataccttcagaaacaaccggcgaatgctgggcgatatcagcccatccgcacggaatgagcacggtcaaaagcggtccgtatcaagggaaaaccttgatggaactgtgggatcagcatagagaattattcggcggaacggaaggggaccggtttccgctgctgacgaaaatactggacgtcaaacatcatcagtctgttaaagtccatcctgacgattatgacgccgaggagcatggacagggtgaaacggggaagtctgagtgctggtacattatcgactgtaaagaaaatgcggaaatcatatacggtcacacggcccgttcgaaagcggaacttgtcaccatgattaacagcggtgactgggaaggcctgctgcgccgtgtgaaaatcaaacccggcgatttttattatgtgccgagcggaaccatccatgccatttgcgcgggggcgctcgtgcttgaaacacagcagaattcagaggccgcctaccggatatatgattacgggcgtacagatcaaaacggccaggcgcgtgagctgcatatccgcgatgccgtcaacgccgccaccgttcctcatgtggacggatttttagatgaatcaactgaaacgagaaaaggcgtcaccatcaaaacctttgtgcagggagaatatttttctgtatacaaatgggatatcagcgggacggcggaaatgacccaggacgctccgtttatgctgtgcagcgtcacagaaggaagcggctccatcctctgtgaaggcaagtccgccaagcttgaaaaaggcgcgcatttcatactgccggatcagatgcctgactttacgataaacggagattgcacgatcatcgtttctcatatataaaaccaaacttaatcccagctctgggattaagttttttttatttggaaaattgggtgatttctctctgtaaaaatgaagaaggccggccgataaataaactagtttgatagaaaccaattgaatcagaaagaggagaaggaatgaaaaagagattcgttgcacctatgttattgtccgccgttttccttgtcttttgcacccttacacagcccgcagaggccgcatacagcgactactccgtttacgagctggaaacgaagcagcaatttgcttctgagaacgaggcgcttcaagcggcagcgaaattgaaaaaggatacggggtggcaggctgacgcaaagaaagccggaaatacgccgctcacttatcaaatctcagcttcaggattacaagatgaaacggatgcgaaaaccgtgctgaaagattttacgaagcagacgggcgtgtccggcacttacagcgcaagcggaagcaaacagccgtacgtgaccgtcacatcaggcgttctatcagacgagcggcagacgaaaaatcttcttgccgaactgacgaaaaaaacgggcgtgaccggcgccgtcaagccggcggggacaaaacagccgtacatgcaggtcgtgactgctgagatggcggccgaagcggacgcaaaagcgctctcgcaagcgttgacgaagcagacgggcgtgaaagcgtcataccgtcagatcaaacgggaaacagcccggtttcagatccaatcaggaacaatctccggcgatcaaaaagccgctcaaatccaaactgattttcaaaaggaaacaggattgcaggcgtcgctgaaagtcacggcaaaggccagtccgaatatcaccgtgacagcctctgacatttcaaatgcaaatgatgcggcaggtttagcgaaacagctgcagcagaaaacgggcgtcaaagggaatgttcaaaagtatgcccatagcaaaacagcaaccgtgtacaacgtgcagtcaggatattttaacggagtaagcgccgtacaaaatgctatcacccaaatcaagaagaatacgggtgtgagcggaagctatcaaaaagccggcaagaaaaataattacacggtcgcgatgagcggactgacggctaagcagctgcaaagtgttcaagctttctttaaaaagaaaaaatggcattgcgacgcatcgcctgtcaaaaagacagcatcagtgtccgtttatcggatcacggcagggcagcttaccgctgcaaaggcagatcaaacggaggcgtttttccgccagcagcgtgtaaagacggcaagaaccgcggcgggaaaaacagcagaaaacgaatatcagctgctttctcagcagacggcagaccagtcgaggataaaaaaaggattgaatctgctggcgggatataaactgactgccatttcaaaaacgatatccaagcagacggacacaacgtaccaagtcacaaccgaatcactgcttgatacggcaaagatcaatcgttcgctggactttttcaaagggaaaaaagtatccgcctccgcacagaaaacaggtgaagcagcgtatacacaattcagaattgaaacggcaccgctgcttaaaagggaagacattgaccgcgtgactgcttttttcaagcaaaacaaagcggccggcactgtgaaggagacggggaaaaccggctctgcacagtacgtcatcaaaaccgatacattcagcagtaaaaccgttttaaataaaagcatgagctttttcagcgccaaacaattacaggccggctatacgagtgaaagccatccggtttatgaactccgcattcgcgatcaattcacgggagcgcagtcagcggacgccgcctcccaaaagctgaaaaagctgtacggatggatgatggctattttgaaaataaaaaacggaccgcaaatcatgaataccaattacaacatctcgctggcagatatggtcaaaaaacaaatgacagtcagcccgcagactgatgccgcggcttatgcatcacttacgtacatcaatacggcctccggaacggtcacagccgacgtcctgaacgtccggtcaaccccggaagtcagctccggcaatattatcgggcagttgaaaaaaggcgataaagtcagcatcacaggccagacaaacggctgggccaaactcagcatgggctggagaaacgccagcagtgacgaagtcgggcagtatgtcaatccggctcacttcgcacaagacagcaagtattactttcaatttctgaagctctctcagacagccggactgaacgcatcggaactgaatcaaaaagtgctggtcaataaaggaatactgacagggaaaggccaggcctttattacagccgccggcaaatacagcatcaatgaagtgtatttgatttcgcatgctttgcttgaaacgggcaatggcacgtcagagcttgcgaacggcattatgtataatggtaaaaaggtttacaacatgtacggcatcggggcttatgacagcaacccgaattactacggcgcacaatacgcgtataatcaaggctggtttacaccggaagccgcgattatcggcggagcccaatttatcggtgcgtcttatattcacaatccttcatacgagcaggatacgctgtataaaatgagatggtctccagccgcggcccatcaatatgcgacagacatcggctgggcgtataagcaggtaaaccgcatgtacagcttatactcactgctggatgactatacgctttactatgatgttcccgtgtatatgaaagtataaaaaaagggctgaagtgtatgcttcagccctttcttcatgcaaaaaacacccgccgtcggattcaggcaggtgcttcagcacaattcttcatttttgtttccgcaaatttcaataacgcttcactcgaattcccatctgaatacatattccatttgtctgagaaccgcttcatttcttctgcacgaaatggctttttcgtcatttcctccagaagggcttcgctgtcatgacaagcctttccgggaatgacggaagtataattgtcgattaaaccgcgttttcgatcatattcctccagatcatatgtgaaaaagaaaatcggtttatttaagagcgcgaattcaaaaggcacggaagagtaatccgtaattaaaatatcagccgctttcaagagatcatgaagacgcatgtcagacacgttcttgatcagttcgctttcaaacgaagccgaaatctgatgcaaaacggcagggtgaagctttacaagcagcatatactctccgtttaacgcgtttgtgagctgttcttcggtgaatggcagccgaaaggattgcatatcataatccctgaatgtcggtgcgtacaggatgatttttttcggccatttgtgcttcagttcgggcttgtgttcttcataatagacgtcagtcagggggacacccgtttttaacagctggccgtcccgtatgccgaacgactttttaaaaacgtcagccatcgcgtctgaaccgacggtgacaaagtcaaacgagcggtacacttttttaaaccggctgatatctgatgccggacggttttgattcgtcacatcctcaaggccgaactttttcaaagagccgttcgcatgccacacctgaatgcatgtcgtttgcggccggcggtttaagacgcttgtcatgaggaaatagttatccgttatcaccgctttgctcttaaaaaggatcaaaacagccttcaaaagatgcagcggatgtttttcgttcagataaaaagagccgataccttccagctcttttttcagactgacggcatgtctcgtatacaaaaccgtcatttcataagaaagcgattcagcgtgcgctttgtaagaacggatgagagcctgcgcattctcttcaaaagataccagcagggtcagatggttcttgggctttacaggcttgaacaaaacgccgagaacagacagatatatagaataaaaagcggcgaataaagatcgcaagttcatagattaccaatctcttttgctgttttatttgtttaaagctgtttcgtttgatcttcttcctgcttggaatacaggcttttatttgatttattatttctcaaaacggtaaaagcatacttcggaatgttcagcatccttttccatctccacggattcgtcaccagtctgtacagccattccagattcgttttgatcatccattcaggggcgcgtttcaccgttccgctgaacacatcaaagcttccgcccaaaccgatcgatacagcttgagggaaaagatgtttgtattcataaataaattgttcctgatggggatatcctaaggcgacaaacacgagatcgggtttcgcccgggaaatctgtttggcgacgaagcgtttatccgcttcataaccgttgctggctccgacaacctcaatattcggatactctttgctgatccggttcaaaacggcgtcaagcacgtcttgtttagctccgtataaaaatatttttttagactgccggtttgcgaggccgagcagcgcaagaaacacatcgaatcccgcaattcttgatttcagcgggtgctgcgtcaaacgtgacattaacacgacgccgataccatccggcaggacgaaatccgcggaagaaatgacttgatgataacctttgtctttcgccgcagcgtatccgatctcaggattgaccgtcgcaatgacggctccttgcttttgtgcgatataataagtgtctaaatatgaaataaactcctgtaaatttccattaacgtaagaaaggttgtgcaccatttcagtctgcatctgccgtcctcctttttgtacgggattttctttcactttttcgtgaattaggctaagctttattttaacataataccttcagataaacttaacaatagttttacaaaaatataaataagataacaatttctttaatcatacgcgcaaaaaccctgctaaactcctattgtaataacatttgttaataagtggaatgtaacttcattttacattggcttaaccttttcagggctatgtgatataatgaggttccatgagtacgaaattggcactttagtgattaaggatacagctgcgcagcatttcagagcagttgcttgttatacgtatgatgatagaaaggagcttttgtttcatgaagaaggtcattacttacggaacgtttgatttactgcattggggtcatattaaactgcttgagcgcgcaaagcagcttggagattaccttgttgttgccatctcaacagacgagttcaacctgcaaaaacaaaaaaaggcctaccacagctatgaacacagaaagctgattctggaaacgatccgttatgtcgacgaagtcattccggaaaacagctgggatcaaaaagtacgtgacgtagcggatcacaacatcgacgtgttcgtaatgggagacgattgggaaggcaaattcgatttccttaaagatcaatgcgaagtcatctacctccctagaaccgaaggcatttccaccacacagattaaaaaagaaattgccggggtgtaattgaaacattcggatatacagatgataaagaagtactccctccggatagggagtacttcttgtaatataaggttattttcgctatatttgttatgcgcttttgaaaaaaagctagacaataagaggagaatttaaagatgaatcttagtaacttttttaagttgaataaaaaagagtccaagccgtccgtagaagaacgcgaatataccattttaaacaaagaagcattggcggaagagaagaaggtagcggtagtcgttcctgtttataatgcagaagaatatgtaaggaaaacagttgattcagtgatccttcaaaacatcggctttcagcatatttctttaattcttgtcgatgattgctctactgatgattccagaaacatcctgactgagtacgccgagttgtatgaaaatattacagtcgtctttttgaaagacaacacgggaaccccggcttatccgagaaacttggggattgagctggcaaatgcaaagtacattacatttttggatgcggatgattggtttgcgccgaacggagttaaaatcttattcgacatgcttgaaagagatcaggtaaattatgcggtcggaaaaacgatcgaaatgcaggtgaacggtcaaaaaacgatcgggaaacatgagtcttctctgaacagagcgaaggtatcgcctttttcaatccggcatattttctatcatctcggcccgcgggcaagaatgatgaacttacaatttctaaaagataatgatatcagatatccggaaatgaaatttgctgaagataagcaattttttatggatgttcttttggcgtgcggagatatttcaacgtcaaccgagccggtctattatctgaacagaatggacaataatgagtcgctgacaaagcagactaatataatggaaaaaaccgacacgaacatagccgtaatgaagtatattctgaacaaaaaattagatactgaaaaagagaagatggcaatgaaccgcctgatcgaattcgattccattacgcgtcttttcgatcggatgcacttcctgaaaagcgaaaacaaagaagcctactacaataaattcaatgaaattctgaatgtgttaaagaagacgaaatacgatatttccgagacattttttcatccgattcataaaacagcctaccgtctgctgactcaaaaacggtatgatgaggtcgaaaagctgttccgctggtccaaaaaagagcccgataaaaacatcgtgacgcaaggcggactggcttatttagaaagcccgctgacggatgaagaaaataaactggtcgaacttcgcatgcacggagaaacggaaagcgcggtgttcgccgatcataaattcaccgttacgttccgcttgttcggacaggacagaaataatgcccaatatattcagtttcagcacagagataacatgaaagtattccaccagtttccggttcagtcactgggagacgggcggtacgtccttgaaatcccgttacgtgacattgaaaaagtcggacttggcggttatattatgtatgtcatttataacgattatgaacgtgtcatgttaaacagagacgacggtgaaaaggtgacggcagaagcgaacggactgcaatatcaattctaccggacggtgaaggagaacctttcactgaaagtaacaaaatgatgattgtgattggatatgtttaattgaaacagaggagtagacttattttatgggtatagaaaatcctgtcagatacaagttaaaacatcttaacataaaggaagagacattcagcattacgatatcctgtgaaaatgtcactgcaggggaagagccttctcttcagattataaatcgtaagacaaaagcggaactttccgtccctctgaaacggttggccggagaaggcggggagtaccatgctgtcatgagcacggatctgctttctgaccatacggacggcaaaggatgtctggatttctatgtctcctttatcaatgatgacagtgatatcagtaaaaaacggttaaaatccagccttgaacctattgaactgtcttcttataaagatgaggctcatcatatgttctttttcccttacacgacgaagaaagggaatttctccttaaagctgctgcagaaaaagtttgtcacgcggattgatgaaatggagctcgaatctgacggcagcttacatctgaaaggttttgcattccggctgaatgcggcagaaaccttaaagataaaagaaaaaaacctgattcttaaaatgaaaaaaggaaaagaagaggagcctctcattctgaagtatccgcttcacgacgtgccgagacacgaccttgatgaatatgttcaggacacaacgatgcttgacacgataggctttgatacaaaaattgatttgaatgctgtttataaagaattgaatcagcagctaacctttcaattccatattcaattcatttttgaagatgccgggacgggtgaagagattatcaccaacagcaaaccgttaaaggttctgaaatctgaacaagtaaaccctaaccaattcacgatcctgaaaacggagaaagggcctgccagatttcacgttttcacgaaaaagaaaacgaaaaatctccacctgagaatgaacgattacagcttcagcacccgcgtggagtattttgtgaaaggaaagctgaaacggggcgtttcctttgtacgcaagagaaagaataagctgaaaaagttcattgagaaaagaatacaaaacacttataaagcgggattcagggttgcggggaaactgcctgtcaaacagaaatttgtcatgtttgaaagctttgccggaaaacagtacagctgcaacccgcgggcgatttatgaatacatgagcaaagagatgccggaataccgtctctgctggagtgtaaaccccgcttactcacagacatttaaagataaaggaattccttatatcgaacgctttacgttcaaatggctgtttgccatggcaagagccgagtactgggttgtcaacagccgtatgccgctgtggattccgaaacctgagcatacgacatatgtccagacatggcatggcacgcctttaaagcgccttgccgtagatatggatgaagtgcatatgccgggaacaaacactgaaaaatacaagcgcaactttacgacagaggcttcaaagtgggattacctgatttcaccgaacgcatattcaaccgaaatattcgcccgggcgtttcagtttaataaaaccatgattgaatcgggatatccgcggaatgacttccttcaaacggataacagcccttctgtcatcaaagcgctgaaagaaaaaatgaatcttccgcaagataaaaaagtgattatctacgcaccgacatggcgggatgaccaattttataagaagggaaaatacaagtttgaccttgatttagaccttcatcaattgagagaagcgatcggcgatcgttatgtcattattttaagaatgcattatctcgtggcggaaaactttgatctcggaccgtatgaaggatttgcgtatgatttctccagctacgaagatatccgtgagctgtatatggtctctgatttactcataacggactattcctctgtcttttttgactatgcaaatctgaaaagaccgatgctgttttatgtgcctgatatcgaaacgtaccgggataaactgagagggttttactttgactttgaaaaagaagcgcccggcccgcttgtcaaagaaacaggtgacgttatcaaatgggtcaatgaaacggaatcagatgattataggcttccggattcattcgggcctttttacgagaagttctgttatttagaaaccggggaatcgtctgaaaaagccgtaaaagtgattttcggggacaagtaaataagtgcaaaaaagcataatttaaccacgttaattatgcttttttgcttaagtgacggcatgttgcgctcatgggactcaggcttgttatgaagtgaaaaatacatcgtaatctgttacaattatgagcggtgcttttgtaagtcaaagctattacctaaaacttacgactaaggaagattagaatgaatgcattggtaaaaattctgaaagagcaattcaactcatttccgctgattatgcggcttgcagtgtacgaaacgaaatcaaagtatcaagtgaactatttgggtatattgtggcagtttctcaaccctatgattcaaatgctggcttactggttcgtatttggtctcgggattcgcggcggacatgatatggtgcttggaaatggagacagcgtaccgttcatcgtctggatgctggccggcttaattccttggttctttatcagtccgacgatactggatgcatctaacagcgtttttaaacggataaatttagtgtcgaaaatgaactttccgatcagttcactgccttctgtagtgatagcatcgaatttattcagttactttgtgatgatggcgatttatattattgtgctgctgagcaacggactgtttccgacgcttcactggctgcaatatatttattacttgttttgcatgatcagttttatgtttgctttcggcctgtttaattcaaccatcagcgttttaatcagggactatcagtttttgcttcaagccgtcacaaggctgctcttttttcttctgccgattttctgggacattgcggagaaattcggaaacagacctgaagttttgaccatcttgaagttaaaccctcttttctatattatcgagggctttagagacagctttatggaagggcagtggtttttccacgatgtgaaatacacgctgtatttctggttcgtcacactgctgttattaacagtcggttcacttcttcatatgaaattcagagataagtttgttgactttctttaatatagtaaggagattatacgatgaaactaaaagtttcgttcagaaatgtttcaaaacagtattttctatataaaaaacagtctgacaaaattaaaggactgtttttcccaaacagaaatcaaaaaggttttttcgctgtccgaaatgtttcttttgacgtctatgaaggggaaacgatcggattcgtagggatcaacgggtctggaaaatcaacgatgtccaatctgcttgcaaagatcattccgccgacaagcggggagattgacatgaacgggcagccgtctttaatcgcgatttctgccggattaaacaatcaattaagcggtaaagacaacattcgtttaaaatgcttgatgatgggtctcaacaatcggcagatagacgagctttatgaaaaaatcgttgaattcgcggatatcggcgactttatagatcagcctgttaaaagctattcaagcggtatgaaatcccgtctcggttttgccatatcggcgcatatggaccctgacatccttattattgatgaggcgctctcagtaggggaccagactttctatcagaaatgtgtggaccgcattacggagtttaaagaacgcggcaaaacgatctttttcgtcagtcattccatcggacagattgagaaaatgtgtgatcgggtggcttggatgcattacggcgaaatgcgcatgttcgacgaaacgaaagccgttgtgaaagaatataaagcttttgtggattggttcaacaagctttcaaagaaagaaaagaagaaatatcaaaacgagcagattgaaggcagaacgcgggcagccgaggaacagaaaatcagtcaggcgcagcaaaagaaagcgaagcccaaattcattgccaatacgatacagattacgctgcttgcattgctggctgtcggcgcaggcgcttcgatgttttcagacaagcctctgcgtgcgattacatctttcggtgacgtcaaacagagcgatgccggcctttatgagtctgtgaataaacctgctttggtaaaagctgaaaaggcggacctttatactgaaaaagatataaaaggaaaagcctccgcaagtgtaaatttcggcacgaaggtgcaggtagaagccgaaaataaccaggcggccaaagtgaaattaaacgataaagagtactttatgaaaaagactgatctgtataaagtgaacgctttaaaaaagacggatgttcagcttaatgatttcagcggcagtttatcaagccaaacagcagaagagtttctctcatatctcaataaaagccgggacgatgtacagagtaaattgaaaaatccagctgccggacaaacggctgacggacggaacgtattaaaaacatccgatgcaaaaacggatgtagtgattgacaaggatacagtctccgaagtggtttttcatttatcgcgtcccgcagacatctcagctttaagtgaaaaaggcggcagcaaaatcaatcagaatttgctcatgcttaaaaaccaggaatatactttttctgtgaacaatgctgataaaacactgaccgtaacgtctaaaaagtaaagatcacataaaaaaagctgccggattcggcagctttttctattcgtcagcttcttctttttcaagaagatccttcatgaacggaattaatttatggcggatatcctgatcctgtaaggcaaattcaagcgtcgtctcgataaatccgagtttttcaccgacatcgtaacgttttccttcgaaatcataagcgaagacacgctgaatgtcattgagcttttggatggcgtccgttaattgaatttctcctcctgcaccgacttcctgctgttccaggtacatgaaaatttcaggagtgaaaacgtatcttcctaaaatagccaagttggaaggagctgtgcccggttcaggcttctctacaaaatttttgacctggtaacggcggccttcatttgttaacggatcgataattccgtagcggtgtgtgtcgttttcaggaacttgctgaacaccgatgattgaagacaatgttttttcgtattcatccatcagctgacgaagtcccggtttttcagcctggacaatatcatcgccgagaagaacggcgaaaggttcatcgccgatgaagttgcgtgcgcaccaaacggcatgaccgagtccttttggctctttttggcgaatatagtggatatccgcaatatttgacgattttttcactttttgaagcagttcgattttccctttttcttctaaattgcgttccagttcaggggcattgtcgaaatggtcttctattgctctttttccttttccggttacgataataatatcttcgatgccggattcgacagcttcttcgataatatactgaattgtcggcttatcaacgattggaagcatttctttaggcattgcttttgtggccggcaaaaaacgagtgcctaaacctgctgccggaataatggctttgcgtactttcttcactgaataacaccatccttgtttctgcaaaatctttttttcagaactataacctagtctttttccactttaccacaattgattaaaattcacaccttttaatccgctttcaaagagtcttgtaacggtttttgctttgtttgccattaagctttacaatatctaagaaacggcataaatatgttaacatgaagggatatccgacatataaaacgaggtgcagacaaaccgttgaaaaaactaaaagtaatgaccgtattcggtacaagacctgaagcaattaaaatggctccgctcgtattagagcttgaaaaatatcaggaaattgattcgctggtgactgtaaccgcacagcacagacagatgctggatcaagtgcttgaagcattcagcattacgcctgattttgatttgaatattatgaaagagcgtcaaacgctttcagaaattacatctcatgctttgctgaaactggacaagctgttccaagaagtaaaaccagatatcgttttggtccacggagatacgacgacaacgttcgccggaagccttgccgccttttatcatcaaatcgccgtcggccatgtggaagccggtctgcgtacgcataataaatactctcctttccctgaggaaatcaatcggcagatgacgggcgtgatggctgatgtgaattttgcgccgacaagccaggccgagcagaatctgctttctgaaaataaaaagccggattctatatttgtcacgggaaatacagcgatagacgcgcttcaaacgacagtgcgggaagattattttcatccgatttttgacaagctggaaggaagcaggatgattcttttaacagcgcacagacgtgaaaatttaggcaggccgatggaacagatgtttaaggccgtcagaagagtcgttgaagagtttgaggacgtacaagtcgtttatcccgttcatttgaatcccgcagttcgtgaggccgcagaagcccatttcgctgattcggacagggtgcacttaatagaacctctggaggtcgtggatttccataacttcgctgcgaaagcaagtttcattttgaccgactcaggcggggttcaggaggaagcgccttctctcggaaagccggtcttggtgcttagggacacaaccgagcgccccgaaggagtgaaagccgggacattaaagctggcgggtacagatgaagaaacggtgtatcagctgacaaaacagctcttaaccgatcaggctgaatatgaacggatgtcaaaggcgtcaaacccttatggtgacggatcggcttcaaaacggattgtggaagaactgctttatcggtacggctatagaaaaacccgtccgcagccttttacagaataaaaaaactctgcatcatatgcagagttttttattatttcaggctttcttttaattcttttttgactgaagcgaggcttgcttcatctaatttgtaataatagatattgttgattctcgttcccgttcccttcagttcatgctgagtgactttgctgcgggcgtttttatagtcagtcataaccgtccacatatcatcgaatgacatgtttgttttcatattgttttcaatgaccttaaacatatctccgaatttcgtgacagacgagatgtttgcccctttagaaataatcccttcaatcacttggcgctggcgctgctgcctgccgaaatccccccggggatcttcttttctcatacgcgtgtaggcaagtgcttcttcgccgttcaggctgatgttccccgttccgaaagagtgcccgtcgtagttgaaggcaaacgtgctgttcaccgtaatcccgccgagtgtatccacggtatctttgaagctctccatgtttactttcacaaaataatctaccggcacgtcaagcaggtcctcgacggtatccgcggccatctgcgttccgccgaaagcataggagtggttgattttatccatcgtacctttgccggagattttcgtatacgtatcacgcggaatgctgaccatttctgttgtattcgttttaggattgacggtcatataaatcatcgtatccgcgcgccctttgtcatttttccgctcatcgacgcccatgattaaaacagaaatcggatccttctttccgagatctatatccgtgtcacgtttgtccgattttttcaagtcttcctgaatgcttgccaccgttgaagccgctttgtgccacaagtagtagacgtagcctcctgatgataaaactaacagcccgatgattgttacgattgtcagaagaacttttttcttctttctttttcgttcagctctcatttgtcatcaccttttctattaactttcctgatacaatttactaatctttataaacccagtcatatttttacttataaccatgtaatagacgaaattcttaaaaaaaggttacaaaaagaccttaaaattaccttaaaaaaaagttagtataagacgatacataaagatgaggtgaaaaaaatgaaaaaaactattgcagctacgttcttaatactgcttttttctgttgtattggcagcgtgcggaacggcggatcaatcaaagaagggaagcggttcttcggagaaccaggctcaaaaagaaacggcatattatgtcggtatggcggatacgcacacaattgaagtaaaagtggatgatcagcccgtcagctttgaattttctgatgacttctctgatgttctgaataaattcagcgaaaatgacaaagtcagcattacgtatttcacaaatgataaaggccaaaaagagatcaaggaaatcgagaaagcaaaataatacaccatgatcagcaaaaggcgggataaaaattgaagaaaacaatatgggctgtctgtttttctgtgatattcagcctggctttattaccggaaagcacttttgcgtccagttctgatatctcagtaaaactgacgaattatattggtaataaatcgactctgaatatcgaaccttcaggaacttataaactgacgggaagcgatgtctcctccgttgccagattgggaggcgcgtccaaatatgatacggctaacgctgcgacatccaagtattggaaaaacccatccaacgtagtcgtcgttaatacggatgcttattttgcggacacgctttccgtcattcctttagcgaataaactgaaagcgcctgttctgctgactgaagcgaaaaaactgagcagcagcacagaagcgcaaatcaagaaattcagtccggataatattttaatcatcggcgggacgaacagtatttcgtcagccgcggaaaagacattgaagaaatacggccgtacgaaacggatcagcggaaaaaacagatatgatctgtccaaaaatattgcggccgaaatgggcagctatgaccaggcggtcgtagtaacgggggatgtatatacggatgcgctggcaatcgcgccttatgctgcgcaaaacggctatccgattctcctgacgaaaaaagactcccttccgagctacaatctgcctaaaaaagtgatcatcatgggaggcacttcaagcgtcagcaaagatgtggagaatcaaattaaaaagaaggcctcggtcaccaaaagaattaccggatcaaacagatatcaaatatcagcaaacgcagtcacttcgctcggcatggatgcaagcaaaacggtggctgccaacgggactaaattagcggacatcgttgtcggatcaaatattgccgccgcaaatcacatgccgcttgtatacatcaaaaaaagcgaaacacccgccgacgaggccagcctttttaaaacgaaaggcacctattcttatacattaataggcagcgcaaattcaattgccgattcagttaaggctgcttacgcaaaagagttttatctcgtaaacggaaagacataccgtattgaaacgtccggcggcaaattaggcgttgcaggcattaacagcggaaaaacgtctttcaaggcggttcctgaaaaatattcaacagcaaacacaatcagcattgacgggaagccatatctggggaatatgagtttcactgcggaatccggcaaatatgtaagacctgttaatgaaaacattccttttgaggattatctgaaaggtgtcctgccgaatgaaatgccgggaagctggccgacagaagcgctgaaagcccaggctgttgctgcccgcacctactctatcggcaagatgggacaaacagtcgcggatacaacggcctttcaggtttacgggggatacagctggtatccaaacgccaccgcagccgttaacggaacaaaagggaaagtgctcacttattccggcagattgatagatgccacttactcatcaagcaatggcggttacatggaatccggcgatgaagtgtggggatcgaaagtgccgtatttagtagccaaaaaggatacaaaagatccggaaatcagctggtctttaacattgcagaagcagcagctgccagcgggtctggatatgaaaaaccccgcatcctggtggtctaaaacaaacgaagcaaatgccgcgcagctcaacggaataaaaaattggctgatgaaaaataaagaaaccaatgcaagttccataaaaattgcaagcatctctgatctctcgctcaccggaaaaacaaaaggccagcgcgcggaagacgccgcggtgaaggtcacgtaccatgtgaatgacaagtcgaagggctatgtcatgaacaagactgcatctgttgaggtgaaagcgtctgaactcaggacgatgatcggagcttcatcttttaaaagcacatacgccagtgcgtccggtaattcttcgcaaatcacgatatcaggaaaggggtacggtcacggcgtaggaatgagtcaatacggagcaaaagaaagagcggaggccggagagccgtatacttctattcttgcgttctattatcctaatacagcacttacaaactactaaacttctgtggaggagatcggattgaaattcatcataaaatgtctccccgtctttattctcggggtcattctatttgtcccttccgctttggctgacaacacggttaaaaggatcggcggaagcacccggtatgatacggctgtactggcggcaaaacaatcatggggtgaagcgaaaacggtcattatcaccggcggaacttcatatgccgatgcaattgccgctgcgccgctttcatatcaaaaaaatgcgccgctgctgtttacaaataaagatcagctgtctgccggcacaaaaaagggattaattgatttaaaaacgaaaaatgtgattatcgtaggcggcacacctgccgtttcgaaaaatactgaaaatcaaattgctaaattaggcatcagtgtcaaacgattatcagggagcacgagatatgccacagccgcaaaagtggcgggtgaaatgacaagatcttctacagcccttgtggtcaacgggtttgttgatgcagatggaatggctgcgatttcttatgcgtccgctaaaaaatatccgattttattcactaatgattcgacattaaatggttctacgtccaatgcgatcaaaagcttggggattaaaaacacgattgtcatcggcgggacaagcagcatcagcagctcactttacaataaactgccgaacccttcaagaatcagcggcaaaaaccgctataacctgtctgtgaatcttgcaaaaaagacaggcttaagcacaggctatacgtttgttaccaatggctttaaagaggcggataccatcgtcggaggcgtgctgagcgccaaacagggaagagttcacctgctgacgaatggagacagtctgtcaaaagacgtccggacgtatatcggaagtaaaaacatcaccagcttcactgtcataggaagtgcttcatctttaagcaacaatgccgcgtcacagcttaaaaatccggttgtcggcaaaacggtctttattgatccggggcatggctatcaggattcaggtgcaaccggaaacggcttgcttgagaaaaatgtaaaccttgatatcgctacgcgtcttaacaatcaattatacggcgcgggcgcgcttactgtaatgtcgaggaagggcgacacctttgactcgcttgaggagagagtgaacaaaggggcgaaggcgaacgccgatattttcatcagcgtccatgcgaacgcaaatgataacagcagtgcaaacggtacggagacgtattatgataaaacgtaccaatccgcaaacagtctgaggcttgcccaaaatattcagccgagaatggtttctgctctcggcacgcgtgaccgcagtgtgaaaactgccggattttacgtcattaagtattctaaaatgccgagtgtcttgttagaaaccggttttgtcacaagcccgattgatgccaatattttaaaacaatcaacgaaaaaggacagactcgcggcggggatcacccaaggcgtttcctcctatttccgataattttttcatggaaacagaccggttcataccggtctgtttttttatttttcattatgctttgtctcaaatatggatatgaatagatttacaataaaaaaacaataatcgaaacattctaataaacattaacgcttcctttacttccaattaacatccatctgctaaactcacggcataggtcatcaaacatcccaacaaatcgtgaggtgtgtgtcagtgggagcagagaaaagcatgaatgtaaataataactatgcagtgcggcaggggacttccgctgccgttacggaaagaacggcccgttatttggcttttaagcgattcatggacattgtgtttgcgcttgcggggctcttggcggcgctcccggtgatgggcctgttctccatactgattcgtttggagtcgcccggcccggctttttataagcaggagcgggtaggcaaagacgggaagccgttttatttgtataagctccgctctatgaaaatagatgctgaaaaatcgggggcggtctgggcgctgaaaaaggatccccgcgtgacaaaggtcggcgcttttatcagaaggacccgtattgatgagctgccgcagctggtaaatgtgcttcggggagaaatgagcctgatcggcccgcgtcccgagcgtcccgtgtttacggaacagtttcaggctgagattccggggtttacggagcggctggccgttaagccgggattaagcggctgggcgcaggtcaacgggggatatgacatgacaccgagggaaaaactgatgtttgacttatattatatccgcaacctgaccttttcattggaactgaagattatgctcaaaacgtgcaaagtgatctggaccggtgacggggcgcgataaaaattctggtcagcagacaaaaaagtagggaaaacgatgcctagtattacaaatcaaatcttgagcggcgccaaatggacaagtatttcgacagcgtgtattacggtcattcaaatcgtccaattcgccctgctcgggcgggtcatgtcactggctgaattcggccttgtcggcatgatcacaacggtagtggtgtttgcccaaattgcgctggatatgggttttggcgccgcgctcattcaaaaagatcatgtgactgataaacagatgtcttccttgtactggctgaatatcataacggggcttgcgctgtttgcgctgctgtttttcagcagtccgctcatcgccgatttttatcggcgggaggagcttgtctatttaatccgcgtgctggccgttatgtttttaatcgcgccgatcggtcagcaataccagtatatgctgcaaaaagcgctggcatttaacacgttaagcaagattgaaatcttttcaaatgtgctgtccttcgtgtatttggcggccgcggttttttatacggacccgattctcgcctatgtgatttctcaggtgctgctgcaatcgtcgaaagggattctgtactggatggcctgcagaaaaacatggagaccggcgttggtttttgatctgaaaggaatgaaaggtttcttttctttcggggcctttcagctgtcttcccggcttgtgaaccggctcggagcgaatattgatatgattctgatcggcagttttatcggcgctgaggcgctcggcatttacaatctggcctaccagattgtcacgcttccggtattaaaaattaatccgatcattacgagagttgcgtttcccgtctttgcgaaaaacaagcatgaaaacagcgttatcagagaaggatttctcaatatgaccaaaatactcgcgctgatatcctttccacttttgctcggtttggtttcagtgtcggatgcattcgtggcttcggtattcggagaaaaatggctggcggctgtcccggttttaaacgttctcgccatcgtcgggatattaagggttctgatgaatccgaacggatctgtgctgctcgcaaaagggcgggccgatctggcgttttattgggacgccggggtgatgctgctgtatggtgcatctttgtacgccgccgtgctgtccggaaatctcttgacggtagcctggacgtacgctttcatcagcatcctgaatttcctgatcgggcgctggctgttggcatatgtcattaagctgcggctgtcggcttacttcaaagccgtggccaaaccgtttgtgcttacggcggcaatgggtgtcatcgcctttacagccagcttcggcacggagcggatcagccttgatgtcaagctgcggctggcgatctccgtagcctgcggcgcgttgtgttatttattcctgttaggaaaagcttatccgcatatgaaaagtaaattaagaaaaggacgtttgctatgaaggtattgtggatgacaagtgtctatccgagcagtgagaagccgggagaaggcgtttttcatgagacgcaggcccaagaactgagaaggcttggcgcggagatgaccgtcatttgtccgcggccgaaactcgccgcgccattccgggtgctgaaaaagacgtatcggcaaaaggatatcaggccggcgcatgaatggcggaaaggcgtgtccgtccaccggccgttttatcaggcggttcccgggcagctgaaatgggcgcagccgcataaaagaatggcggaatccattctttccgaaattaaaaatcatggcctgaagcccgatctgattcacgcgcatttcgccatgccgtcaggcggagcggccgccattgtgtcaaaggctttaggcattccgtatgtgctgaccttgcatggcagtgatgtcaatgtctatccgcattacagcaaaagcgctcatcgcgcatttacatttgcggtgcgggaagcagccgatatttacgctgtgagcggcagtctgcgggaacaaatgaaaaagcttatcgaagcggagtgcaccgtgcttccgatcggcatcacgcttgacgccttccgaaaaaggaacgagacgaaagaagccgtcagaaaacggctcggccttcctccggataaaaaactgatcgtgttcatcggcaggcttgtcaaagagaaaggtgttttcgacttatcaaaagccgctcagtcattggatgaaagatatgaagccgtctttgtcggtgacggttccgccgcatcttcattgcgtgaagccgctcatatcgtcacggggcaagtgccgaacgacaaggtacaggactatctgctggcttcggatgtaatggcgctgccgtcctacagcgaaggcatgccgactgtggtcattgaggcgctcgctctgaaggtgccggtgatctgcaccgatgtcggaggattggcttctttattcgggaaacaccgggggttgctgatcaagccgggttcacctgagacgcttgcagaatcgattctgcaatatgacgaaggagaggcttggacgccgcaaacagccgaggaactttatcaaaccgtccgcacgtattttgacgcaagccaaaacgcgaaaacgctgaaagagaaataccgatccgtaatgaaccgggccgggcaagaggagaacctttcgaaagagggatgaagctgtgaaaaaaatcgctgtattaggaacagggtatgtaggtcttgtatctggaacttgttttgcggaaatcggccatcatgtgacttgctgtgacatcaatgaagcgaaaatcagaagcttgcaaaacggagtcatcccgatatatgaaccggggcttgaggaattagccgaaaaaaatgtcagtgccgggcgcttatcctttacggccggcattgagccggctgtgaaagccgctgatatcatctatatcgcagtcggtacgccgatgtcaaagacgggtgaagccgatctgacctacattaaggcagcggcgcaaacaatcggagaacagctgaacggatacaaaatcattgtcaccaaaagcactgttccggtcgggacgggaaagctcgtttaccaaatcgtcaacgaagcgtcaaagggaaaatatccgtttgatgtcgcgtcaaatcctgaattcctccgcgaaggttcggcggtgcgggatacgatgcagatggagcgggcggtcatcggcgccacaagcgaacatgccgcttcggtcattgaagagcttcataagccgttccgtacgaagatcgtaaagaccaatcttgaaagcgcggaaatgattaagtatgccgcaaatgcttttttagccgccaaaatatcttttattaacgatatcgccaatatttgcgaacgtgtcggggcggacatttcccacgtgtcagaaggcgtcggtcttgacagccggatcgggaataaatttctccaggcgggcatcggattcggcggatcctgctttccgaaggatacaacggctttattgcatatcgcaaacgccgccggctatccgtttcaaatgatggaagccgtcattgaaaccaatcagaagcagcgggtccgtattacggaaaaattgaaccgcgccatcggtcccttaaaagggaaaaccgcggccgtactggggctggcctttaaaccgcacacaaatgacgtccgctccgccccggctcttgatatcatcacaagtcttaaagagcagggcgctcacgtgaaagcgtatgatccgatcgcgattcccgaagcgtcagcgatattaggagacggcggcattgaatatcacacagagctgtacagtgccatcaaaaacgcggacgcatgcctgattacaacagattggccggaagtcaaggagatggatcttcagagagtgaagcagctgctcaaacagccggtcatcattgacggcagaaatatgtttccgctggagtatatgagggtttcaggattcacttatcattccgtcggacgtccggcggttcatgccgatcggcaaataaaagaactggcaagatagaaaaagattgtcttcaggctctcggcagcccggctcggctgccggttttggaaaggggtttgccatgtgagtatcaaacgttcagcggcacatgttcttgtgctgcttgccgctctcattacaggaggattcatcatgctggaggcggtcagggcggatgccggcttcggaaaaatcaccgtgctgctgcttgccgccatgatcggtattgccggacttgctttgctatccgcctttacaacaaacggtcagatgtttatggggctcatttatatactgatcgcgtgtacatttttaaaccaggccttctttgcggtccatctcggatttttcagcttatttatataccggctgttattaatcggagcgggcgcccttcacatcgccggcatcctgacaaaccgccatcatattgacagatggaatcgggtgaatgtaaaaggggttctgatgtttttcgccttatggtttacatacggtctcctatcgttattgtgggcaaaatccgtgacgtacgggattaaatatttagctttaatgggaatgggcatgtttttgatttatcttattgtcatgttcattcagcgctttgatcagctgatggttttttacggcatatggcttgtgatgaccatttttgtgatggcgatcggcttttacaaccattttacacaccaccatctgccgagctccacgctttataacggcccgcagtacaaacagcattatccgacgtccgttttctttaatcaaaatgatttcgcaacgtttttgtgcatcagtttctttctgtatgcggcggcggtgaaaaatatgaaaaacggctatgtgaaggccgtcagcctgctctttgcgatctgcgctttgtatttaatcattttgaccggttcgcgcgcgagtctgctgggcatatgcgcgggggcggctgtatacgtcttcatcctgctgccttccctgttgaaaaaactcgcgctgtacgcagcgggagcgggtgcggcgctgtttgcggttttatttgcgggccgtatcaccaatgccgtcttgaatctgttttcagctccgcaggcgatgccgggacagcaaccgcttccttccaaccttgcgagggcgaatcttttaaaaaacgcctttcactatgtgattgattcctgggggttcggagtgggtgccggaaacgtctcttactatttaaaagcggagcccgtttatgatacgggcggcgtagttgaggtgcacaactggctcgtcgagattatggcgaacttcggcgttcttacgatgctcggttacctgacagtctatttgttccttttttggacactttataaatgtcatgaaagaaaatcggaaaatcagtcaagactgatcacagaaggacttatcacggcgatggccggttttttggtaagcagcatcagcccaagctccgtatcaaatttatttttccactgggtatttctctcgctcgtgatcgcggcggtcaatatattgaggcgtttacaaaaggagcctgccgtcacggcgtactatgaaaaacagggagatgcgagatgaaggatatgttgacaagaataacccggcgtatcaaaaagaatatcatttggatcattgcgctgcccgttgtgttaggggcagcgggatatgtattgccgtcaaaaatcagcgggggcagcagttttacatcagaagccgcgatcgccgcgggaaattatgatcatccgctttataacaatacaaaagaaatcccgctccttttgacgagcgatgcctttttaaagcaggctttgcctgataaaacagacgaagaaagagcggccgtgaaaagtaaactgactgtcgaaacacaatcagattcattgatcacggtcagctacagcggccaaaacaaacaggagaccgaatcggtgtttcaagccgtcataaaaacttttctgaagattgatcaggacctgtttgaaaaacgggcaaaagtagtgcggcagagtattgctgcgcttgaaggagaaaccgtcagcgcggacgccaaagtggataaggaacgatttttatacgaattgaaaaatacgcagctgaacctgaaagcggccggcatcatcaattcagagccgatgaatgaaacggcgggacaaggcatgccgccgaaaaagaaagcggttctgggcgttttaatcggcattgcagttgcatttatgttcattgtcattcctgagttttttagagagtccttgtaaaaatctgcgatggagatgtgaccatgacaaactggaaacctttcgtatctgtcattacaccgtcttataatgcaagtgaatatatcgaagacacgattcagtccgttttacatcaaagccacccgcattgggaaatgattatcgcggatgattgttcaacggacggaacgagagatattttacggcaatatgaacaaaaggatgagcggatccgcgtcgtttatttagataaaaacgggggagccgcggctgccagaaatacagcccttaaacatgccaagggccgttatgtcgcatttctggacagcgatgacagatggaaaaaggaaaagcttcaaaaacagcttgcgtttatggcagagcggtcctgcgctttttcatttacgggctacagcgtcatggagcaggacggaacgccgacggacaaaacgattcaagcccctgaaagcctgtcatatgatgaagctttaaaaaacacgattatcggatgtttaacggtcatgattgacagagagcagacggggcagattcaaatgcctgatatcagaacgcggcaggatttagcgacatggctttccctgctgaaaaggggatttacggcttacggcctgaatgagtgcctttcagaatacaggcttgtgcagaattcgatttcaagtaacaagtggaaagccgcaaaaaaaacgtggtttgtttatagagaaattgagcgcctgcattttatcaaggcttcgtggtgttttatgcaatatgcaaaaaacgcggtcttgaaaagactgtaggcgtcagaggagctgggtgatgaaggtggaaccgattattcacgtaatcgtcggagcggcggaatgggggcatgaccggctgagatacagacggcaccggctggctgaatttctcgcccggcaaaaagaaacgaaaagcgtcatttgggtatgcccgtctccgcgagccaatgatggtcagatggccgggatcgccgagggaatccggcagttcactgtaaaggatctcatgcggcaaaaagctttccgcttcggcaggtatacagacatgtgctacaggcataagctttcaccattggtgaacatgctgaaggaagaaggagaaggggcccgctgctgcttatggtacaccttccccggttttccgcttctggcagatctgtttccttgggatgaagtgatttatgattgcagtgatctgtgggccgctccgatcagcggccgatccggggtgctgtcaaatgttagaagaaacatcattaaacaggcggaaatgagaatcattcagcgtgccgattccattacgtgtacatctgactgtctgcaccgggaggtcggaaaaaagctggagaatccgcaccagaaagtgttcaccattgaaaacggagtggaatatgacctgttttcacgggaaaataaacagccggatgaagacattttacggggacggaacggaacggttctcggttttatcggcggaatcaaaccgaagctcgattttgcgcttatggcggaaacggcagatgtgaggcctgactggacgattttattggtaggcccgaacacggctcaggacgatccggatttcaagtcgcttctggagcgtccgaatgtcatctggacgggacctgccgcgccgaatgaagtgccgtcctatatgcagcttgtcgacatcggcatcatgccgtataaaaattcaccttataatgacgcggtatttccgcttaagctttttgaatttttagccgccggaaaaccagttgtcggctgcaacctttcttctacgtcaaaaatcaaaagacctttcgtctatgaatacgttgaaggcagtgaccccgcagatttcatcgcggcctgcgacgcgcttctggcagcggaccgcagcggatcatatgaggctttgcgccgtgaattggcccggagacgggattggaatgttttattcggccgaatgctcgaatgcacgggtatattgaaaaatgcgcaatcccattaaaagggaaagcgcattttttgatttgcgtgtttctttttgatgatgcttgttataataactagtaagaattataatggaaggaacggttcaatatcagaaaagacttcatataattccaaaggagacttctttatgcttgacgaacgcatgtttcgcatagttgttgcgttttttgtctctctgctaacggttttaatcctaactcctatcgtaaaaaaaattgcgatcaaaataggtgcagttgaccagcccagcaaccgaaaagtacatgataaaataatgccccgtatgggcggcctggccatctttatcggcgtagcggcgggtgttctcgcggccggcatatataatgaaacgaaaatgaccgccattacagtgggtgcgtttattattgttattttaggaatccttgatgataaataccaattaagcgcaaaggtaaagtttttcgtccagctggccgtggccattatgattgtgagcacgggactgaaaatggactttttctccgtaccgtttttaacggaacgtttagaattgggatgggtcgcttacccgctgactgtgttatggatcgtcggtattacgaacgcgatgaacctgattgacggtttggacggactcgctgccggcctgtcggtcatcggactctccactatcgccgttatggcgttatccggagggaaaatccttattctgtcactttcacttgtcgtgataggaagcacactcggatttttattttataattttcatccggcaaagatatttatgggagataccggatcgctctttctcggatacgtcatctcagtactctcattattaggtctttataaaagtgttacattattcagtatcatcattccgatcatcattttgggcgtgccgatttttgatacgacattcgccgtcatcaggcggattttaaacaaacagccgatctcagcgcctgataagtcacatatacaccaccggctgatggccttcgggctgtcacaccgcacggctgtcattatcatttatttaatcggctttattttcagcgtcagtgccatcctgctgaaaagcgcgaccatatggctttcgctgtttattatttttgtattgattgtatttatgcaaatcatagcagaggtcacagggttagtaaatgaacaatttaaaccatttaccaagttttacaagagattggtaaagaaaaattaaaaagagcagatcatgcgaatggtctgcttttttgtggattctgctattctgctattctcttattatataaaaaaacccgatcctgctcaaaggatcgggtttactcttaatagcctgttgtgccgccggactgtgtgctgtccgtaccgtttgcaccagcagtaccgttggttgaatcggttgtgccgcttgttcctgtgctgccggaagttgaatcagccgtaccgcctgttcctgtgctgtcggaagtcgaatcagtcgtactgtccgttccggtgctgtcagaagcaggatcggacgccgtgctgcttccggacgggtagtccaggtgtttctgcaattcctgccgtactttttcgagattggtcggatcgggctggaaataatacgttccgcccgtagacgcggttccgccgccgcctaaatataaatctgatcctgttatggtcagtgtatcaatctttttgctggtaaagccgttataaatctgctgaagggcgagtccttcagtgattcggatattcgtttgtacatttttgcttgctgtttcagcgattttatcgattttagcaatatttccagccttagacatttggtcgatcagtgcatttaggatttgcttttggcggtcattacggccgaagtctccgcgtttatcctgctttctcatgcgtgcgtaagccagagcctgctcaccgttcaaatgcatgtttcctttcttgaagtagatccgtttctttttactgacgtcactcatctcgtcgaagtcaaaaggcacttttacattgactccgccgacttcatcaataacatccttaaagccgttaaaatcgacagtgacatacttatcaatcggtatgcctaataagtcttcgacggttgagacggtttcatccgccccgcctttagcaaaagccgcattgatttttgattttttaccggttgtatcgccggcaagcgtcacccgcgtatcacgcggaatactcagcattttcattgttttatttctcggatcaagggtaacgacaataagagagtctgatcgtccgccttttccgcttgtggcataattttcgatccccataaacaaaatggagaacggttttttcttcatatcgatgactttatcccgaagttttgatttgtctccgcgggaaagggcatcatatgcattatctgccgcattgatcgttttgtatactttgtatccgccaaacccggcagcgactaacaaaacgagggtaagcagcagcaaaatccgtttgaatatgatctttcgtttgcttttctttttctttcgaacacgcactcttacacgttcagccattacattagtctcctttagggctgacgtctgtttctaaatacgtcagttctccctctgtattcttactcttgccgttcgtcagctctgtcatccattttataaactcgtctttgtctttttcttcaacgtacgtttcaaattcgacatgatccgcataatggatatctttcagtaaaaaaactgattctctcagttcgttctctatcttgccgagccacgtataatccgctgatgtatgcataatccgcatcagcttccgctccgtaactcctatatgatttaagccttcagacactgacttcccatatgcacgaatcaatccgcctgcaccgagctttattccgccgaaataccgggtaaccaccgcgcaggtatctttcagaccgcgttttttcagcacttccagcatggggacgccggctgtgccgcttggttctccgtcatcattcgccttttgtatatggtcggtttcgccgatcagataagctgagcagttatgagtcgcattccagtgctgtttttttatcttttgtataaattcctgcgcttcctcttcagaagcagcacggctcaggtgacagataaaacgcgatttttcaatcacaatctcatgttcacccgtttctttaactgttaaatagctgtgcagcatgattgctggaccctcctgacaagcattaaaagacttgtttctacaaattcgaacagactttagaatttttgcgcatattttggtatcatgaaagagtaagatactatataaaaatgtttttttctagaatatacgcattctttcattataattcgacataaattgcagttcaattacatttataataaaaatacataacaacaccgttacggagggagacagatgaataaatcgaagatggactccaaagttttggattctatacttatgaaaatgctgaaaaccgtggacgggagcaaggacgaggtttttcaaatcggagagcagtcgcgccagcaatatgagcagctggttgaagaactcaaacagatcaaacagcaggtctacgaagtcattgagctgggcgacaaacttgaagttcatacgcggcacgcacgaaaccgcttgtctgaagtaagcagaaatttccataagttcagcgaagaagaaattcgcaacgcctatgaaaaggcgcacaaacttcaagtggaactgacgatgatccaacagcgtgaaaagcagctgcgggagcgcagagatgatttagaacgccggcttttggggcttcaggaaatcattgaacggtcagaatctttggtcagccaaataaccgtcgttctgaattacctgaatcaagaccttcgccaagtagggcttcttcttgccgatgcgcaggctaaacaagatttcggtttaagaatcattgaagcccaagaggaagaaagaaaaagagtttccagagaaattcatgacggtcccgcgcaaatgctggcaaatgtcatgatgagatcggaattaattgaacggatcttccgcgaccgcggcacggaggacggatttcaggaaatcagaaatctgcggcagaatgtgcggaatgccctttacgaagtcagaaggattatatatgatttaagaccgatggcattggacgatctcgggctgattccgacactgagaaaatatctttatacaactgaagaatacaacggaaaggtgaaaatacattttcagtgtatcggagacacagagaaccaaaggcttgccccgcaatttgaagtggcgcttttccgtctcgctcaggaagccgtcacaaatgcactcaagcattcagaatcagaggaaattacagtaaaagtggaagtaaccgctgattttgtcgttctcatcattaaggacaacggaaaaggctttgatattaaggatgctaaacaaaagaaaaacaaatcattcggcttgctgggaatgaaagaaagagtagatctgcttgaaggaacgataacgatagactctaaaataggtcttgggacatttatcatgattaaggttccgttatctctcggcctataatttgttaaatagagccaaaagacatattgaccgaacagcggcgtatatagaacaataggataaggaggcgtagcgtgtgactaaagtaaatattgttattatcgacgaccatcaactattccgtgagggtgtaaaaagaatattggattttgaacctacctttgaagtggtagcagaaggtgacgatggagatgaggcggctcgaatcgtcgagcattatcatcccgatgttgtcataatggacatcaatatgccgaatgtaaatggagtagaggctactaaacagcttgttgagctgtaccctgaatctaaggtgattatcctctccatccatgatgatgaaaactatgtgactcatgctttaaaaacaggtgcaagaggctatctcctgaaagagatggacgcagatactttaatcgaagcagtgaaagtggtagccgagggcggttcttaccttcacccgaaagtaacccacaatcttgtcaacgaattccgccgtcttgcgacaagtggagtttctgctcatcctcagcatgaggtttacccggaaatccggagaccattacatatattaacgagacgggaatgtgaagtgctgcaaatgcttgcagacggaaaaagcaaccgcggaatcggtgaatcattgtttatcagtgagaaaacagtgaaaaaccacgtgagtaatattttgcagaaaatgaacgttaatgaccggacacaagccgttgtcgtggccattaaaaacggctgggtagagatgcgttagccatgtgtgagaagacttgcctgttatggcaagtctttttttacagctgcatatctattaaaatacttattaagtacttaataaggcaggtaaagtgatgaagattgcagttgtaacagacagtacagcatatattccgaaagagatgagagaagaacatcatattcatatgatccctctccaagtggttttcggtgaaaaaacattccgcgaagaaacagaactcgactggagaagtttttataaagaagtaaaaaatcatgatgagctgccgactacgtctcagccttctttcggtgaattaatcgcattgtacgaagaactgggcaaaacatatgatgcagtcataagcatacatttgtccagcggaatcagcggaacatataacagcgccgcctcggcaaacactatggttgatcatattaaagtttatccctttgattcagagatcagctgtttggcacaagggttttatgcgttaaaggcagcacagctcattaaagacggtgttgactcaccggaagagattataaaagagctggaagaaatgaaaaaaacagtccgtgcgtattttatggtggacgatttatcacacctccagcggggcgggcgtctaagcagtgctcaggcttttatcggcggtctgttaaaggtaaagcctattcttcattttgacaataaggtaattgttccttttgagaagattcggacacgcaaaaaagcgatttcgagaatttttgagctgtttggggaggatgcaagtaaaggaatcccgatgcgggccgctgtcatccatgcaaacagggaagaagaagcggcggctattatacaggagttaagcggtaaatatcctcatgtcgaattctataacagctatttcggtgccgtgatcggaacccatttgggcgaaggcgccatcggaatcggctggtgctttaaaaactaagtgaaaatctccgttttcaagggcggagatttttttattttttaattttcgcaattcgacaagtgggttcccgacaaggcatactttgagcagaaaggaggcagggagatgtccgaaggtgcttcagaattttcagaggtgcgggatttcttttacggccggcatttattgagatctgagataccgttttcagaccagcgcattaagcgttttacagaaaaagaatatataacggccgagccgtcaatcatccgccggaaaaatcgttacgtctgccaacgatgcggtcagtctgatcaagcctgctttgcggcattttgggcgccctctgccaaaaggcagattacctattgccgtgcctgtgtcatgatgggaagggctgatgaactgacatcattatattcttggaatcaaacccctgaaaacagctgggagcctgtaaagctttcttgggaaggaacactgacagacggacagaagcgggcggccgccgcgcttacagatgcgataaaagagagacaagagctgttagtatgggcggtttgcggatcggggaaaacagagatgctgtttccgggtatcgagtttgcgctgaatcacggtttgcgcgtctgtgtcgcgactccgcgtacagatgtcgtacttgaactgctgccgagactgaaaaaagcatttgagaaagtcgaagtttctgcttggtacggcggcagcgaggacaaaggccgtctgactccgttaatgatttcaaccgctcaccagctgatgcgctaccgagacatttttgatgtcatgataatagatgaagtagatgcgtttcctttttcagccgatgagacattaagattcgctgttgataaagcgaggaagaaaaacagcgcccttgtttatgtaacggcaactccttcagacacattaaaaaagaaggctgaagccggtttgctgaaaagcgtccgcataccggccagatatcatcggaaacccctcccggagccgcgttttttgtggtgcggcaattggaagaagaagcttcagaaaggaaaactgccgcgctctgtaacggattgggtccgccaaaaacttcaatcacagctgccggttttcttattcgttccgtctgtacatgtattgaaaaagacaacggattattttcagaaattaaacatacgggcagaaggcgtacatgcggaagacacattcagaaaggataaagtgaaacggttcagaaacggccggcttgacctgctggtaacgactacgattttagaaagaggggttaccgtgcccaaagttcagacatgtgtcctcggcgcagaagcacctatctttactgagagcgcgctcgtacagatcgcaggcagaacgggaaggcattataaacatttcagcggtgatgtcgtcatgtttcatttcggaatgacaaacggaatgaaaaaagcaaaaaaacatatagaacatatgaacaaattggcacaaaaaagtaaattgttggactagttaatttcagaaaacatgatacagtatactcatactttcctatgaggagctgtcagcatgcttgtcaattcaaaagaaatcgtattaaaggaacttctcgaccgccatatgtctcagcttcatatgaaatgcacatgccgggtatgcaaaaatgatgtactggcactttcacttaaccgggctgaaccggcatatgttacagataaaaagaaagttgcttatgcaaaagcagagatagttgataaacagaaaaatacggcgctgcttgtcattctggctgaatcagcggcgattgtttcggttaatccaagcgagttctgtgaaactcgggaaggagcgtaatatctctgaattgtttattgtgtgactcaccaatttcaagttcattgacttggagatctctattttctctggcgcccgagcaagaggtatgcagcatatgcagcagccaattcgaaaaaattgaaggccccgtatgcagtatatgcgggaggcctcaggagtcaaatgaaaaatgcgctgattgtgcggcccgggaatcaaaaacggaaaagcgctttttgctgcggcaaaaccgttcggtatatttatataatgatgcgatgaaggactcattggcccgttttaaattcaggggtgatgcaaaaatcattcaagcatttgaacgtgactttgctgccggctttaaagcggcatatccatcaaatacacatactctcatccctattccgctgagcggcgaacggctggcggaacgcggattcaatcaatccgagctgctggcctctctgctcggaatgcctgtcatttcccccctcatccgactgaacaacgaaaaacaatccaaaaagagcaaaacagataggctgtctgcagaaaaaaagttttcagcagccgaaaactccgccgaaggtatgaacgtcattttaatagatgatatttatacgacgggcgccacacttcaccaagccgccgaagtcctgctgacagcgggcaaagcgtcatcggtctcctcttttactttaatcaggagctaaatcattctttttttctgccgatataattgatagaaatataaggcagattaaagaaggaataggagttaataagatgggtgaattggcgaattgtccaaaatgcaatgctttattttttaaaacgaacctgcagaccgtgtgccaggcatgtattaaagaagaagaaaaagcatttgaaaccgtctataaatttttgagaaagcagatcaacagacagtcgacgatgcagcagatcactgaggaaacaggtgtggatgaagagctgatcctcaagtttatcaaacaaaaaaggattcagatcagccagcttccgaatttggcatatccttgcgaaaggtgcggaaatccaatcaggacggggaaattttgcaagtcctgtcagacagatattgagtcgcaattagaccatatgaaccaaaaaacagccgctgaattcgaagataaaaacagtacaaaagacacatactatgcctataataccaaaaacacctgattccctaaactaactgataacgcagtcgataaaagaattagactgcgaacagaaagcgagaggaatcctatgaaaatcaatcagtacggaacacaatccgttaatccataccaaaaaaattacgaaaagcaagccgtacaaaaagaggctgcaaagccgaaggacaaagtggaaatttcttctcatgcaaaagagcttcaaaatgcgtcagatgcggtcactaaaacacgacaggaaaaaatcgctcagcttaaagcggatatagagagcggaacatataaaatagattcaaacagcatcgctgaaaatatagtaaatttctataaaaagcaataaaaaggagaaagccaatgtcagcaaagccaattattgatcaactgaagcgactttgcgcactgcatgaacatctgctcacgctgtctgaggagaaaacggaagcgctgaaagcaggtaaaacaaaagagctctccaacatattgaccaaagagcaaaagtatattcaggcaatcgggcagactgaggaagaacgaatcaggttaacttctcagtttctcagccgcggtgaggacaatacaattgctgcatgcatctccagaacttcaggcagtgaaaaacaggagcttgaagggttatttcactctttgtctgcgcttcttgaccgtctgaaagaagtgaatgagatgaacaaacagctcacgattcaggctttacaattcatctccggggcattcgatatgatcatgccgggtgaaaaagagaatatgaattataaagagccgcaagcggcgcgcaagcctgtcagccgtttgacattattcgattcaaaagcttagaacggaggattttcaatgccatcgacttttatggggctggaaacagcaaggcgtgcattgagtgcgcagcagactgcattgagcacagtttcaaataacgttgcaaatgcaaatacagaaggatacacgaggcaacgcgtcacattacaatcgacgagcccttatcccgcagtatcaaaaaacagtgatctgacggccggccaaatcggaacaggagtaaaagccggttcagttgagcgcgtcagagacagttttttagactatcagtacagaactgaaaatacaaaattagggtactatacagcccgttccaattcattgtcgcaaatggaaggcgtcatgaaagagcttgacgataacggattaaacggatcgctcagttcgttttggaatgcccttcaggatctggcgacgaatccggaaaatacgggagcgcgctcagttttgcaggagcaggggaaatctcttgccgaaagttttaactatatatctacctctttgactaacattcagggtgatattaaaaagaacctggataacacagcggatcaggtcaattccgttctcaatcagctgaatgaccttaacaatcaaatagcggcagttgagccgagcggtatgctccctaatgatttgtatgaccaaagagacagattgattgatcaattatcttctatggcaaacattaaagtttcatataataagtcgggcggacatgccttggcgactgctgagggcacggttaacgtcgaattgctgaacggaaacaacaattctctcggtacgctgctcgacggtaacacaaaaacagtttcagaaatgaaaatcaactacgataaggacagcggcctcgtgtcgagtgtgtcagtcggcagcaatacggtcaatgcggatgcatttaccggaaaaggctcactcttaggtcttattgaatcatacggctatatgtcaaatggagaagaaaaaggtctttatcctgaaatgctgacggctcttgacaatatggcgctgtcctttgctgacgcgtttaatgcagttcatgaaaaagggaagacctatacaggcgaacagggtgcagcattttttgatttcagcggtggtgaagcggtgccggcaaaaggtgcggcagcgaaaataaaagtcagtgacaaaatccttgcgtctactgataatatcgcagcgtcgttaaacggagaaaaaagtgacggcacaaacgcgacaaatcttgcagccgtacagaacagcaagctgactattaacggtgaaaccactacaattaatgacttttatgaatcccttatcggaaagctgggcgttaattcacaaaaagcggccaatcttatgaacaactctgaaagcaacaccctttcagccgatgaacggagacaatctgtcagtgcagtgtctttagatgaagaaatgacaaatatgattcagtttcagcacgcttataatgcggctgcgcggatcataacgatgcaggatgaaatattcgataaaattattaacggtatgggcaccggaggaagataggagataagtaaatgagagtaactcaagggatgatcgcaaaaaattctcttcgatttatcggctcaagttatgacaagctcgatcggcttcagcagcaagtgtctacggggaaaaaaatcacgaaagcttctgatgatccggtcgttgcaatgaagggaatgcagtaccgtactcagcttgcgcaggtaaaccagtatcagcggaatgtttcgcaaggctttacatggctggaaaactcggaatcaagcgtaaactcggaaacggatattatgggaaaaatccgggacttgatggttcaggcgaaaagtgattcgaatggtgaaacagaattgaaagcaatcggtacagaaatcggccagctgaaaaagcagctcgtttctgtcgcgaatactcaggtaaacggacgttatctgtttaacggaacaaattcagacgtcccgccgatcactgaaaatgccgacggcacatatacgtacaactatgagaattatacaggtgcttcggatgttaacatcaacatctcgaacggagcagtgttgaaagtgaattctgatccgaactcagctttcggaggcgtcgcacaaaatggagataatgtttttgaatttcttaactccttagaagcttctttaagcaaaggcacgctgtccgaagcagattcagatcaaattctgtcagatattgacggttttactgataaaatgaatgctgaaaaatccaatatcggcgcacgcacaaaccggttggaactcattcagacaagattggaatcacaagcggcaaccgctgaaaaagtattgtccgataatgaagatgtagaaatggaagatgtaattgttgattatttatctcaacagacggttcatagagcagcgctgtcagtgaatgcgaacatcattcagccgtcactgattgacttcctgaaataatataactgatcgtcttcaatatataaaaaaagcgactcacaacagggagatcgctttttttactaaaatactataaacaggagggatctctgtgcagatgccgagattgattattgacagtgtgcctgctaaaatcggtataacctttcaaaaggaagaaatcgagatggaacagccgcccgctgacttggaaatcgagcagccgccggcagagctgaacattgaaagcacgccggccaaactgacgattgaccagacgagggcgtgggagaacttgaatctcaaatcatttgaaaagctgaacgctgaagccgcccagaaaggtgcggaagcctgcagcgagtttatcgcaaaaacagtcagggaagggaaggaaatggcggctatcgaaaagaaaacgggcaatgtgatggcccggcaggcagcagatgtcagaccgcccgatccattcggcgaattcagcgactttctgcctgcgcagtttctcgtcgacattgactgcattccttcaaagcttacgattgatattgaagcccgcaaaccttcaattgaagcagccgtcaataaacctgtatggaattatacgccggggaaagttcagattgatatgatgcaagaccctaaggtgacgatttcggttgacgatggcaacgcagaataaaagatgaaagtggtaaaggattgtgaagcatgataattaaaacaaaatatcacggagaaatcagaatagacgaagggcagattatctcatttgaaaacggcctgccgggatttaatgacgagactcaatttgttgttcttcctttgtcggaagattcaccgtttttggcgctgcagtctgtcaaacaggagcacatcgcctttattgtcgccagtccgtttattttctttaaagggtacgaatttgacattgaccatgcgacgcttgaacttttgcatattgaagatatagaggacgtcgaagtgatggcgattttaacgctggaagagccttttgaaaacacgaccgccaatttaaaagcgccgattatcgtcaataaaaaggaaatgaaggcgaaacaaatcattttacatgatgcttcctatgaaacaaaacatctgataggaggaggatcatgctagttctctcaagaaaagtgaatgagtccattcagatcgggccggatattgaaataaaggtgatcgccatcgaaggagaacaagtgaagctgggaattgaagcgcctcagcacgtagatattcacaggaaagaaatctacttgtcgatcctggaagagaacaacagagctgtatcttttaatactgatttattacttaacctatcctcacaaaaaaagtgaggatttttttattttcaatataaacaatagaaacggccatccgatatatatagtgtagccaatgagaggaaaaattttcttcagaatgacgctgcgcaaatgcacaaggacgtgcgaaaaacaattcagggaggaaatacaaaatgagaatcaaccacaatatcgcggctcttaacacaagccgtcagctgaatgcaggttcaaacgctgcttctaaaaacatggaaaaattatcttcaggtcttcgcatcaaccgcgctggtgatgacgctgcgggtcttgcgatctctgaaaaaatgcgttctcaaatccgcggtttagacatggcgtctaaaaacgctcaagacggaatctctcttatccaaacatctgagggtgcattgaacgaaactcacagcattcttcagcgtatgagcgagcttgctacacaagcggcgaacgatacaaacactgattctgaccgttctgagcttcaaaaagagatggaccaattagcgtctgaagtaacaagaatctctactgacactgagttcaacacgaagaaacttcttgacggaactgcgcaaaaccttacgttccaaatcggagctaacgaaggccaaacaatgagcctgtctatcaataaaatggactctgaaagcctgaaagttggtacgacttacacagcaaatgatgacggttctaagcttgtaactgcagatggaaaagaagcaacccttgtcactgacggttctaaagggccgaatggctactatgatgatgctgataaattagtttatcaagctgacagtgcattagctaaagatacaaaagtaacaaaaggtatcgacatctcatcttcagctaaagctgcgtcttcagctcttacaacaatcaaaacagctatcgacacagtttcaagcgagcgcgctaaacttggtgcggttcaaaaccgtttagagcacacaatcaacaaccttggtacttcttctgagaacctgacttctgctgaatcacgtatccgtgacgtagacatggcttctgagatgatggagtacacgaaaaacaacatccttactcaggcttctcaagctatgcttgcgcaagctaaccaacagcctcagcaagttcttcaattgctcaaaggttaatgacggaaagatcctggttctccagggtcttttttttatttcttcagctatctcccccttcagcaagccaaagaaccctattgacaaaatgaaacattatattttgcagttaaattattgaaaaccttttaatatgaccgatataagaataagatcatacatttatggagctgtgatatgataaacagtcggaaactcactgttgtcatagagccgtctacgactaaacgctgaaaaggagagggtacatatggtcacaagaatcacaggccttaattccggtcttgatgtagattctctggtgaaaaaactaatggatgccgaaaagcagccgcttaataaattaaaccagcaaaagcagacgcttgaatggaagcgcgatgcttatcgggaagtgaatacccagattgccgacatgtattctacgacatttaataatatgctgatgtccacaaactggaataaaaaaacagtaacaagttcggattccagtgtcagcgcggtggctgtcagtgctgaacagaatatttcaacgagcatgtctgtacagcagctggccacaccgacgacttataaatcatcaggggccatcaatttcacttcaggtcagagccaaacattgaaattcaatgtcacaaatccgggtgaaacgaagccgactgaggtaaacgtcacgatcgccgcaaccgatacgattgacgatgtcatttccaaactgaacagctcaggccttggggtgacggctttaaaagagaaaatttccaacggcacggattatgtggatacgattgcgttcacttccaataaaacgggggaaggatttaccctttcagcaggtgatgacgcaaccaaaagctttctgaaagatcagctcggttttgccgttgatgatgcaacaaatgaactgacggccaatgccgaagggaaaaacgcgaagtttacgttcaacgggcttgaaatgacaaaaacgtccaataactttacgatcaacggcatcaaatacacgctgaacagcgtgacggacagcaataaaacggttacgattaacagcacgactgatacggacggcatttttgacaacattaaagatttcgttgataaatacaatacgttaattaaaagtgtaaacgagaaggcgtcggaatcaaaataccgtgattataagccgctaaccgatgaacaaagagaagcgatgaccgataagcagattgagcagtgggaagcaaaggccaaaagcggtttattacggagcgacagcacgctgcagaacggtttggcggagatgcggcttgatctgtactcaacggttacgattgacgggaaaaaatatcagcttgcagatttcggaattgagacgtctgatagttatacggatcaaggaaagcttgtcattaaagacgaagcgaaactgaaacagaaaattaccgagaatcctgctctcgtggctaaactgtttaatgcagacagccctgatacagcgaaaaccaaaaacccggaggaacaggggattgcccggagattaaaagacacattaaacaaaatgcagattcaaatttcaaaacaggcgggtacggaaagctcggtatcaaccagctttgccatcggaaaaagcctggatgaaatagaaacaaatatttccaatatgaaaacgaagctggatgacatcgagacgagatattataaaaagttcagcgcactggatacggcattggagaaattgaacagccaatcttcatatctcacgtcaatgttaggatcttcaacatcataaccttggaggttttataaaaatggcaataaataatccttttgctgcttatcagcagacatccgtctttacagccgctccggaagagctgacccttatgctttataacggctgcctgcgattcattaagctggccaggcaggcgatgaagcaaaacaaccttgaagccaaaaatgaaaatatcgtaaaggcgcaaaacatcattcaagagctcagcatcacgttaaaccgggagattgagatttctgaacagatgtcatccatttatgattacatccgccgccggctgatcgacgcgaacgtgcagaataacggagaatttttagatgaagcggaaaaactcgttactgaatttcgcgacacgtggaagcaggccatgcagagtgaacggaaaaacagccacggcgcgggcggccttgcctgatgaacagcaatgtcttttctttgtataacgaaacgaagaacatgtacgccgcactgaaggacgccccggaaagcgacggtcttatcagcagcgttacggcatttacggagaaaagggaggagatgcttgcgggcataaagccgcctttttccgaagaagaaaaaacgctgcttcagcaggtggccgcgatggaccgtctgattaccggcgaagtgaaacggattcaggatggtatccgaaatgaaataaaaacgcttaagaaaaaacgaatctaccataatacgtatttcaatccgtatcatcaaacgacaagtgacggccgtttttacgacaaacgcaaataggtgagtgttttgagaagtttgaacgattaccatttggtgtcagcctactaccagcttctttttacgattgatgaggggctttgctacctgttggacacgcaggatgatttttttaagacggagggcgagcggatttacaacgatttgattcaggctttttttcatctcgattcctctcatgcgcttctgctgtctatcattgagtgccgatgcgtggagacggcgatccgctcatttgacgagatctttcaggatttcagcatgttaaatgattatgatttcccgtccgccccttttcaggagtttttaaaaaccatctttctgccgcattataagctatggatggagcagacgcacgactgcatcaaaccgtatgttcttcactagacctgctgcaagcggcaggtcttttgcctgcgtcctccgcatatacttataatcctggcggaagctgccggataaaaccgacaccattcgtcatcgttcaccgaatttacacattattttaacgtttcagcagggatcagaaggggtaaaagagaaatagttacatatccttagataaagggaggcgttctttgatgaactacaatatcagaggagaaaacattgaggttacacctgcgttaaaggatcatgtggagagaaaaatcggcaagctggagcgatatttcgagcagagcgtcaatgccgatgtgaacgtcaacttaaaattctataatgataaggaatctaaagttgaagtcaccattccgatgactgatctggcgcttcgttctgaagtgcataacgaggatatgtacaatgcaattgatctcgcaacaaacaagctggaacgtcaaatccgaaagcacaaaacaaaagtcaaccgaaaattccgcgagcagggtcttccgaaacattatttcgagaacggcagcgctgctgatacgggcgtagcggttcaggacgaaattgaagatgacagcccggaaattgtccgtcaaaagcgttttaatttaaaaccgatggataatgaagaagcgattctccaaatgaatatgctcggacataatttcttcgtattcaccaacgcggagacgaatctcacaaacgtcgtttaccgcagaaatgacggcaaatacggattaattgaaccgactgaataaacccatccagccttccgtgaacgcgcggaaggtttttctctatctttatctgcaaattctttggaaatagcaaaaggtatgttatgataatgagaggtatacatggacagaaaattatcatttattccatgcaaaatctgcatgtgaacatagaggagcgttatagatgcttgggattttaaataaaatgtttgatccgaccaaacgtgcgctgaacaaatacgaaaaaatagcaaatgacattgatgccgtaagaggagattatgaaaatctctctgacgaggcgcttaaacataaaacggcagaatttaaagagcggcttgaaaaaggagaaacgacggatgaccttcttgtcgaagcgtttgccgtcgttcgtgaagcttcccgccgcgtaaccggcatgttcccgtttaaagtgcagctgatggggggcatcgcccttcatgaggggaacatttccgaaatgaaaacaggggaagggaaaacgctgacgtccacgcttcccgtgtatttaaatgcgttgacgggaaaaggcgttcacgtcgtaacggtcaacgaatatctggcgagccgtgatgcccagcaaatgggagagatttttgcgtttctcgggcttacagtcggcctgaacctgaattcgatgtcaaaagacgaaaaacgcgaagcttacgcagccgatatcacgtattcaacgaacaatgaactcggctttgattatttgcgtgacaacatggtgctctataaagaacaaatggtgcagcgcccgcttcattttgccgttattgatgaagtcgattcaattttagtcgatgaagcgagaacgccattgattatttccggacaagctcagaagtccacaaaactgtacgtgcaggcaaatgcgtttgtccgcacactcaagaaagatcaggattatacgtatgacgtcaaaacgaagggcgttcagctgacggaagaaggaatgacgaaggctgaaaaaacgttcggcatcgacaacctgtttgatgtcaaaaacgtggccttgaaccaccatatcaaccaggctttaaaagcccatgcggcgatgcagaaagacgtggattatgttgttgaggacggccaggtcgtcatcgttgattccttcaccggccgtctgatgaaaggacgccgctacagcgaaggtcttcaccaggcaattgaggcgaaagaaggcctggagattcaaaatgaaagcatgacattggcgacgattacgttccaaaactatttccgtatgtacgaaaagctggccggtatgaccggtaccgcaaaaacggaagaggaagaattccgcaatatttataacatgcaggttgtatccatcccgaccaaccagccggtcatccgtgacgaccgtccggacttgatctaccgctcaatggaagggaaattcaaggcggtggcggaggatgtcgcccagcgctacatgaccggacagccggttcttgtcggtacggttgccgttgaaacgtctgaattgatttctaaacttctgaaaaacaaagggattccgcatcaggtgctgaatgccaaaaaccatgagcgcgaagctcagattattgaggaagcgggacaaaaaggcgctgtcacgattgcgaccaacatggcgggacgcggaaccgacattaaactcggcgaaggcgtaaaagagcttggcggccttgcagtcgtcggtacggaacgccacgaatcccgtcggattgacaatcagctccgcggacgttcaggacgtcagggagacccgggcatcacacaattttatctttcaatggaagatgaattgatgcgccgtttcggagctgaacggacgatggcgatgcttgaccggttcggtatggatgactccacgccgattcagagcaaaatggtgtcacgcgccgtggaatcatctcaaaaacgtgtcgaaggaaacaacttcgattcacgtaaacagcttcttcaatatgacgacgtgctccgtcagcagcgcgaagtcatttacaagcagcgttttgaagtcattgactctgaaaacctgcgtgacattgtggaaggcatgatcaagtcttcactggagcgtgcaattgccgcttatacgccgaaagaggagcttccggaagaatggaatcttgacggcctcgtggagcttgtgaatacaacgtatcttgatgaaggcgcgcttgaaaagagtgatatcttcggaaaagaaccggatgaaatgcatgagatgatcatggatcgcatcatgacaaaatataatgaaaaagaagagaatttcggcacagagcagatgcgtgaattcgaaaaagtcatcgtattgcgtgccgtcgattcaaaatggatggatcatattgatgcgatggatcagctgcgtcaagggattcaccttcgcgcctatgcgcagacaaatccgctgcgtgaataccaaatggaaggtttcgctatgtttgagcacatgattgagtccattgaggacgaggttgcgaaattcgtcatgaaggccgagattgaaagcaatctggaacgcgaagaagttgttcagggccaaacgacggctcatcagcctcaggacggcgatgaggccaaacaagcgaaaaaagcgccggtccgcaaagttgtggatatcggacgtaacgcgccttgccattgcggaagcggaaaaaaatataaaaattgctgcggccggacagaatagtctcgactgtatgaagcgaacatgaccgggtctgcgtcttatggcgccccggatcttttaatgaggtgaatggaatggaattatcagaaatcagggcagagctcgaaaatatggcttctcgtttagcggacttcagggggtctctttgacctcgaatcaaaggaagcccgcattgcagaattagatgaaaagatggcggaaccggaattctggaatgaccagcagaaggcccaaaccgtcatcaatgaagcgaacggtctgaaagaatacgtgaactcctatcatcagctgagcgagtctcacgaagagctgcaaatgacacatgatcttttaaaagaagaacctgaccaggaccttcagcaagagcttgaaaaagagctgaagtcattaacgaaggaattgaatgaatttgagcttcagctgctgctcagtgaaccatatgacaaaaacaacgcgattttagaacttcatccgggggccggcggtacggaatctcaggattggggttccatgctgctcagaatgtatacccgctgggcggaaagacgcggtttcaaagttgaaacgcttgattatctcccgggagatgaagcaggtattaagtctgtcacactgctcattaaaggccacaatgcatatggctatttaaaagcggaaaaaggcgtacaccgcctcgtgcggatttctccatttgattcatcaggccgccgccacacgtcattcgtgtcatgtgaagtcatgcctgaattcaatgaagaaatcgacattgatattcgtaccgaagatattaaagttgatacgtaccgggcgagcggtgccggcggacagcacgtcaatacgactgattcagccgttcggatcacccacctgccgacaaatgtagtcgtcacgtgccagacggaacgttcacaaatcaaaaaccgcgaccgggcgatgaaaatgctcaaagcgaagctgtatcagcgcagaattgaagaacagcaggcggagcttgacgaaatccgcggcgaacagaaagaaatcggctggggcagccaaatccgctcgtacgtcttccatccgtactccatggtgaaagatcaccgcaccaatacggaaatggggaacgtgcaggcggttatggacggagatatcgatattttcattgacgcctatttacgttctaaactgtcgtaatccgggaacacacctgcctttggcaaggtgtgtttttttatccgttctctttttccatttttcacaacagcgctttagcaaattaatacggtatttggctgttatttacttctaagccgggaagacttaaaatgctatcgagagaaaatcggagaacggaggattttgcatggatgtgaatcacaataagccgctccgtctgatcaaagattatatatacatcatgatcggcgcggcgattacggggatcgtgtttaacgtatttttgctgccgaaccgtatagcagcggggggagtaagcgggatcagcaccattttagaaacgtttggttttgaaccggcttacgtgcagtggattattaacatccctttgtttatcgccggagtgatcattctcggcgggaagttcggaatgaagacactggtcggttccatcgttctgccgctcgccgtctatttaacaagagatctgcctgccgcgacgacccatgaactgctggcggcgattttcggaggcgtcgggatcggaacgggaatcggcatcgtgtatctcggcaaaggctccacggggggaacggctctggcgggccagatcattcacaaatacacggggctgtcgctgggaacgtgcctcgccatcatggacggattaattgtgctgagcgcgatgctcgttttcggagtggagcagggactgtatgcgatgctcggggtatttatttcaagcaaaacgattgatgtcgtgcaggtcgggttcaaccgctccaaaatggctttaatcattacgcagcatgaagaagccgtcagatcggctgtgtttaaagaaatcgacaggggtgtgacgaagatttccgcagtcggcgggtatacggaacatgaccgtccgatcttaatgtgtgtcgttggccagaccgaattcacaaaactgaaacaaatcgtcaaacagattgatgagtcagcctttgtcattgtcgcagacgcaagcgaggtgctcggcgagggtttcaaacgcgcgtaaacggggttataatagcgaaggggtgcatcttacatatgaaatcaaaatgggcgctgctggcgctggttctgaccatgtccgtcctgctggcggcatgcggcggttccaatgaatcgaaaaaagaaagctctgacagttcaggcgggtcaaaagcatctgcgtcagcaggagaagagctttatcagcaaagctgtatcggctgccacggaaaagacttagaaggcggcggaggtccgaatttacaggaagtcggcgggaagtatgatgaagctaaaattgaaagcatcattaaaaacggacgcggcaatatgccgagccatcttgtaaatgataaggaagccgctgagatcgcaaaatggctgtcacagaaaaaataacagaaaaaccttgcctgttataggggcaaggttttttcacggtctgggaatgaaaagaaactgtaatagtaatatgtctaaatttgacgtataatgaagtgtactgaggaaaaggaactttcagatttttcatctgtttcctggtaaaccggccataaaccgcagtatttttacgaactctatggctgcaagacataattaaaagattaggtgatttcatgatagagatgaaagaagtatataaatcctatccgaacggtgtaaaagcgattaacgggctgtcagtcatgattcatcccggagaatttgtatatgtcgtgggaccgagcggagccggtaaatctacttttattaaaatgatttacagagaagaaaagccgacaaaaggacaaatattgattaatcataaagatctcgcgtctgtaaaagaaaaagagattcctttcgtgcggcgtaaaataggtgttgttttccaagattttaaacttcttccgaaactgacggtatttgaaaacgtcgcgttcgcgcttgaggtgatcggagagcagcagtccgttattaaaaaacgcgtgctcgaagtgctcgatcttgtgcagctgaagcataaagcgcggcagtttcccgaccagctttccggaggagaacagcagcgtgtttccatcgcaagatccatcgtcaacaatcctgacgtcgtgatagctgacgaaccgacgggcaaccttgatccggtaacatcatgggaagtcatgaagacgctggaagagattaataaccgcggaacgaccgtcgtgatggcgacacacaataaagaaatagtaaacaccatgaagaaacgggtcatcgcgatcgaagacggaattattgtgcgtgatgagtcaagaggggagtatggttcttatgattaaaattctcgggcgccatttgcgtgagagttttaaatctctcggaagaaacacatggatgacatttgcatccatcagtgccgttaccgttacattgattttggtcggcgtgtttttagtcattatgctgaatttaaacaacatggctaaaaatgctgaaaaagaagtggaaattaaagtattaatcgatctgacgtccaataagaaaacgcaggatacgctgcagaatgagattaaagacatctcgggaatccaaagcgtagagttttcatctaaagataaagagcttgatcaattggtcaaaagcttcggcgacagcggaaaggccatgaaaatgcaagatcaggaaaacccgctgaacaacgcgtttatcgtcaaaacgacagatccgcatgatacgccgaaagtcgcgaaaaaaattgagaagctggatcatgtgtataaagtgacatacgggaaagaagaagtcagccgtctgtttaagatcgtcggggtgtcacgcaacatcgggattgcgttaatcatcggccttctgttcacggcgatgttcttaatttcaaatacgattaaaatcacgattttcgccagaagaaaagagattgaaatcatgaagcttgtcggcgcgacaaactggtttatccgctggccgttcttcctggaagggctgctgctgggggtattcggttctatcataccgatcgctctcgtgctgagtacgtaccagtcgatggtcgcttgggtggccccgaaagttcagggatcatttgtttcacttctgccgtacagtccgtttgtgttccaagtatcacttgtgctcattctgatcggcgcggttatcggagtatggggaagtctgacttccatccggaaattccttcgtgtataaatacaaaagccagtctgatatagactggctttttttaatggtttcgttactgaatgacgggaagggccggtgatccgggctttaatgtaaagtcataagacgattcgtcacggtacagcgggtccgcataaatggaatccgaatcgtttgccgttcctttttggtacgctgtgaatgaatcatattctctgttcttccaattccaaatgccgtcttttccggcttctttgtgatagacgttatgattaacggtattgccttcgttttttgtataatcatttgcgataaaaatccgtgaaccgcttgccgtcatgatgtttttttcgatcgtgttcccttttgtgccgtactgcagcagcagctggccgccgtcaaggtccttcgtgtcatttcgatacataatgttatgagcgatcaccgaattgatggtgccgccgcgtttcgtgtcatagcctccgattgaaataccggtgtaagcattgccgtacaccttgttatccgtaatccggatatctcgtgcgtatttccctctatgttcggaagtggcttcaatgccgaggtcattgttgtaaacggtgttcttcttaatgtccacatgttctgcgccgtcaacgtaaataccgcccgctgaatattcatctccgtaagcgggatttccgtaagaagagttatggctcaccgtattgttttcaatgacgccgtttcgcgcatagtcgttttgcttggacgttccttcgtatccgatcacgtcaatcccgatattgttattgtcccgaatggtattgccggcaatcttaaatccgtcaacattcccgttcagcacgaccgcttcgcttgcgccgagcgtcagtttttcaaccgtattatttgtgatgctgacatccttcatggcgtctgtgccgtaaaacgcgatgccgtgtgcatttccctcatcagccgtggttttaatgtttcggatatggttgccgtcaatgttgatatgactgcttgatccggtgacgcaaattcccatggcagtcgcatcttctgatgatacggagaggttctcaagcgtaacgccgtgaatggtaatgtactgtttattgcggatttgaattaacggagtttcagaatcgctttttggcgcagatttgccgctgattgagacatgctcattctgatagttccgaaatgtaatcggcttttcggccgtgccgctgtgctttacttcaaacgtttcatcgtacgtcccttcccgaatcaatacggttgttccggcctctgccttttcagccgcatgttttaatgtgcggaacggcttttctttcgttccttcattttggtcgctgcctgcgggagaaacatacaaggcgtccgtctgcgttttttcattggcctctgtttttggccagacaaaggcggtaatgcctgcggccagaaccgccgcggataaaatcgataattttattttcatatcgcattctcctgtatatttaatgaattgcatacaaaatattatacgttacccatatatatgtaacaatctcgcgttttcatttttttgttgccgttacatgaattctttgcaatttacacatactatctccaggttttcgtaaaaggactaagaggaggtaaacgatgaagcagaaaatgatcgcagtgatggcggccgtcagcatcatgtgcggcggagctcatattgccggggcggcacagccgaattcaacagacgcagaaagaagccgggcaatggaaaaaatcgaaaaagcttatgagctgatctcgaacgaatacgtggaaaatgtagataaagaaaagcttcttgaaggagcgatccaggggatgctgtctacattaaacgacccttattccgtttatatggacaagcagacagctaagcagttttccgattctcttgattcttctttcgaagggatcggcgctgaagtcggtatgaaagacaataaaatcattatcgtatcaccgtttaagcaatctccggcggaaaaagcgggactcaagccgaatgatgaaatcatcagcataaacggcgagtcaatgaacgggaaaggtttaaacgaagccgtgctgaaaatcagaggaaaaaaaggatcgaaggtttctattaaaatacagcgtccgggaactgataaacagctgtcattccggattaaaagagcggaaatcccgcttgaaaccgtatttgcttcccgcaaagaatcaggcggtcatcatgtcggctacatcggaatatcgacattttccgagcataccgcccaggacttcgccgcggcgctgaaaaagcttgaaaaacaagggattgacggtctcgtccttgatgtaagagggaatcccggcggctaccttcaaagcgtcgaacaaattttaaagcatttcatcacaaaagacatgccgtatatccaaattgcggagcgtaacggcgataaaaaacaatatttctcaaccttaaaacataagaagccgtatcccgtcaatgtcatcacggataaaggaagcgcctccgcttcagaaattcttgcgggtgcgttaaaagaagcgggacattatgacgttgtcggtgacacttctttcggtaaaggaacggttcagcaggccgtgcctatgggagacgggagcaacattaaattgacgctttacaaatggctgacaccgaaaggcaattggattcacaaaaaaggcattgctccgacaatcgctgtgagccagccggattattttgcggcgggaccgcttcagctgaaacagccgcttcagcctgatatgaacagcgcggatgtcaagcacgctcaaatcctgctgaaaggcctaggcttcgacccgggcagagcagacggctatttcagcaaaacaatgaaaaaagccgttctggcgtttcaagaccggtacaggcttgataaaacagcggtcattgataaaaagacagcggaaaaaatgaatcagctgatgaatgaaaagaaatctgacgaaaaaaatgatttacagctgcaaatggcgttaaaatcattatttgtaaaataaatgaaaaggaggcgtttttttcgtctcctgtttcttttgtcatgccctaaaaatgaactaaaagacatataattatgtcggttttgacaagatattaaaaaaattttcacatttaaacatttataaaggacaaacattacccgatatttatagagaagagagactttatgccgagttaatatgtattcaaaatgaaacttttgaaagttgcctcagtcagttttagttcttacaataaaagaaggttctaatagagaacagttttagtttggcagctgcatttcagtatcgaaagcagaagtgtttgcggcgcttcagcacggcagctgtaatcacccgtgcttatctggataaaaaaatgggggttcacaattgaagagggcaagtattgtgcgtgaaaaaaaatattatgaattagtggaacaactaaaagacagaacaaaagacgtcacattttcatcaacaaaagcactaagtcttcttatgctgttcagcagatacctggtcaattatacaaatgttgaatgtgttcacgatatcaatgaggagtgtgcaaagcattatttcacctacttaatgaaaaaccataaacgtttaggaatcaatctgacggatattaaacggtccatgcttttgatcagcggtgtaatcgaggtggaagtcgaccactatctgaaagatttctctctctcaaatgtgacgttgtggatgacggaagagagatagacgtttgagatattcaagccaatgattatttggtagaatagaattaaaatgtttggcttgaggcggtgaaagcaatgtctgttcaatggggaattgaacttctgaaaagtatcggtctgttttttttgcacccgatgttttggttttttatcatcataagtctcgcctgcggatatttgcggattaaacgtgaacgccatacgtttcatacaaaaatcgcggatatgtatgacgagcttatctttacatacataaaaggacttataccgggtatacttctctccatattattttttggactgggaatttcgattccattcggtcttctcggcataatcgcggccgtgacggctttggcttcgctgacgttccgtatgaattggctgtcatcagcttatattgtcagcgccggcatgttcattgcgtttctccttcagtatacccacacagtgccgtttgcggatcggtttccgcaggcattcggcgtgaattgggcatcggcggccgtgtttatgggccttttgattatcacggagggagcggctgcctgccgttcagcgcatctgaaaacatctccggcgcttgtcgtcagcagcagaggcctgcccattggccgacaattggcgaatcgcgcatggctgcttccgcttttcttattggtgccgggcagcgggcttgagtcacacctttcttggtggcctgtctttaccgtgccgggcggctctttccatttgatctggattccttatatcgccggcttcggacagcgtgtgcaggggtcacttccggaagtcagcatacggataacagcgaaacgtgtcatgattctcggggttatcgtgaccgcattcggggcagcggccctttggtggactccgcttgccggagctgccgcttgtattgcggtgctcggacgcctgtttttatcattaagacagcggctgaacgataacgcggctccgttttatttctctaagcgggatcagggtttaatggtgctcggcatcattccgaatacacccgcggacgatcttgagctgaagatcggtgagattattacgaaagtaaacggcatccccgtgaagcatgtatcggatttttatgaagcacttcaaaaaaaccgcgcatttgtaaaaatggagatcatcggcctgaacggtgagatccggtttgatcagcgcgcgtcctatgaaggcgaacatcatgaattaggtattttattcgtgcaggatgaacacgagcacgaagaaatgacagcattataatgtgatttttcataattattcggaatagtttcaagaactcctaaactagatttcaaaataaaacagctaagaaaattatattttcttagctgttttattttgaaataataaaaaaataaatgaaggagaggtatggcttattggaaaggttattgctaactccaaaacctttagaagatgaatctttagcaggatatatattaagaataactgattataatggttatgttggatagggggagtacattataaaaaagcttttacttaagagattaccgttgatctcacttggagttatagcttatatactgacaaaatacgcgcagaaccatcaggattgggcggagaaatacagtaggtctgtatatccgttattgtcaaaaacagtaggacttgtaccttcttgggtcacattttctgttagtgaatggctcgtcgtgttggttgtgttactatttctattttatatcgtttattatgtgcgcaaggtcatcatgagtaaaggtgcacgtaggatggtagtttatcgtggtgctctaggaatcgttacgatctgtagcgtgatatatttttgttatactattttgggtggaataaactatcacagatattcttttttgtctcataccgaatataaagaagagaactacagcaaggaagaactggttaaattgagtaagtcacttgccgttgaaatggaattggcaagggaaaagttagcggatactgatcttttggctcatgtaccagaggtttttgattattatgcacaacacgcagtgttctcgatgcaaatgttatcaaagaaatatcctgttttggagcattcatattcaacaccaaaaccagtggtgatgtcaaaactaatgtcgcatgcagggatacatggtatttttgtcccttttacttatgaatccaatatcaatgttaatgtgcccgttttcttggtgcctgctactatggcacatgaattggcacatcagagtggtttcatgcatgaggatgaggcaaattttatagcatatctggcatgtaagcagcaggatgatccaatgatactttacagtggtttttttctagcatttgattattctatatctgagctaaagaaagtggatccagatcaggcgtctgatataatgtccagtctgtccaaggcggtgcagcatgatatagaacaaaatgagcagtaccgggataagtatgagggtgttattccaagtatttcaagaaatgtaaatgatgtatatctgaaggcaaataatcagacagacggtttgaatagctatagtgatatggtgaatttgttgctggcagagcagcgagagatagagaagtacaattaaatgtatcttgaatacttataggtttatatagtaatgatagtgggctcaagttgaacataggagtgagtgaaataaataaaataaaagtatttcctattccatatgctggagcgtcggtaaatgcatattatgaatggaaaaaactactgccggatagatatgaattgtgtatatgtgaattggctggaagaggaactcgattcacagagccttgttaccagtctgttggtgaagcaagtgaagatatcgccaaaagaataagtgaacaattagaatatgacgatgaatatgttatatttggacacagcatgggagccttattgacttatgagatatattataaacttaagcaaatgggaactaaggaaccaaggcatctgtttttttctgggcgaaatgctccacatatttttgaaaagagagaagacattgaaaatatgactaatgaaactttcttgacaaaggtggaacaatatgggggattaccagaggagttttatacaaaagagattatggatatgtttcttccgattttgcgagcagattttataattttggacaattataagtttcagcccaaagcagaaaaaataagctgtggaacaagcgttttttatgcggatcatgatttttcgactcatatcaaagaaattcataaatggagcgaagttgttgaagggaacgtgaaatttcataagtttaaaggagaacatttttttttgaatcggtatcctaatgatattgtaaatactattgttaaagatacagagacttattcttgttcatgagagattcctcgtttcgtcaatgttggtgtggtaacttacattgtacaagaggaatctctcttttgcattcattttttggtagaatttagataatcgacagacgtgttattatataaatctaaaaagattttggtttagactttcttgtcccaatcaagttccaaaaataaaaatttagactttcttttctttgtacagtttgaatgtgttttgaaatattatatttaaaataaattttatcagtctgagaatccttcaatgattgttacttaattttgcttaattataaaagtaatattcaataattgttttaggtaggttttagtaaggagaattatgaaaaaaattaagaaaaaacattggaaataataagctttcagttttattaattatgaaaaatcacatataaagagcccggtgccgctaacaacacggcggccgggctttttttacggccggattacgatgtcagcgccgaacttgatcggaactctcagccatttacattcaccttttctcttgtaaatcaaaagattctcatagagcaaacggcattgcggtgacactttgagagagaaaatgaagaaggaaaactagaaaaggttccggaaagcagatgcttacggaacctttttcgtttacgccgaatggctttttttcgtctgaacggtttccccggacttgataccaagcgatacgaacaagccgatcacagaaactccgatcaatatgataaacagaatatgaaacccggagattaaaccgatcagtgctgaagaaataatgcttccgaaataacggaaggtggagaaaatcccggatgcgatgccggacatgcccggttctaccgtcgcaagagaagatacctgcatgctcgtcagccccgcacctgacgcgatgcctccgactataagcgatgccataagaaacggaacggaatgggaataaaccaaaagcaaaaataagagattggctacggccatcagcccgaaggacagaaaaatcattcttcgcgcgccccatttctgatgcagctgagctccgccccagttgctggcggacatgaaaacagaaaagactgacagcgccatgccgctgtgtgacgtattcatgctgaagtggccggtcataaagagcggcataatcaataacacggcgtacatcattaaattgcttaacagaaccgacagattggcgctcgtaaaggtcgtgtttttaaacaggtcaaaatcaataatcggatgtttcgtgcgcagctcccgcctgaaaaatagcggaacaaatacgagaatgagcagtgcgtacacccaatagcccaaagagctttcacttttcgtcagaagaataatagatacaatgcttccggcaagcaaaacggacccgatgatatcaagcggagcgtcagacgtttcttctttatatttaggaaacatcactaatgccgtcaccagtgcgattgcaagaaacggaatgttgacccaaaagatcgaatgccagctgaagctctcaattaaaagagagccgataaacggaccgagagccgctcccagcccggcaccgaggccgaaaaagccgaatactttcggaagccgtttttcagacacgacatggcggatgatggcgatgctgtttggcgtaagcaaagcgccgccggcagcctgaagcgcccggaagaaaatcaataagaaaagacttggcgagagggcgcaccccaatgatgcgatgagaaaaaggccgacgccccataaatacatttttttgtttccgtacatatcaccgagtttgccggcaatgggctgtgtcacggccatcacgattaaatacacggtcactacccatgtgatgctggcaattgattcgctgaatgagcgggaaatggatgaaagggcgactgcgatcatcgtagaattgatgggaacgagtatggctcccagcaaaagcgaaacgatcagcgcccattctttctttgaacccatccttcatcctccttggagccggaaaatgaccggccggtaatgcctttcatgaaaatctcagtgctgtgtttcagcatcgtttcctcagagagagtgatgactcttttccccagctgcagccggtgtataaaataaccgaaaatcatcgtcataaagacgtctgcattagcttcttcactgccggggcttatcatatttttctttgtcagctccttaaagtaaacgattaaatgctttttcacggattgcggatatacgacaatatcctgcaggacgtcttcgaatagttccggttcgcgcaggcagatgcggaacacttcttttttttgttccaattgctgaagaagggtcgcggcgaaatgaagaagatcctcatacagatcgccttccgccttagtgatcatgctttccggaaccggcgtctgctgttcaatcatggctttcattaatccttgtttgtttttaaaattacggaaaatcgttgcttcgcttacttttgctttttctgcgatttcttttgttgtcgctgcgcggtatcctttttggatgatcagattcatcgcggcgtcaataattctcttgttcgtcgttctcaacatgtttcacctcgcgtaaatactggcaggacaagtatacacccgccctgcccgtcaataaagagggaaacctagcatgaagcgcgtttgacaatcgtaatcttgccgtttgtcccgtccaccgtgacgatatctccgtcgttgagcctgtcagtcgcggcacgtgtgccgagaacggccgggagcccgtattccctcgcgatgatcgccgcatgtgacaggatgccgcccgtgtccgtaatgacggcctttgcatcctggaacagactggtccacagcggtgtcgtcattttgcagacaagcacgtctcctgttgaaaaacgggaaaattcacttgcgtcacgaatgactttcacagggccgcttgcgattccgcttgacgccgcaagtccgtaaatttgatgttcagtgtttttttcatcttctgtgatggagccggtaatctgttcagccattttcagctgttccgaagtcggagtcccgagataagcgggggcttcaagcaattgatattgctggaagagctgttttcgttcagcggctttttcctgcatcggaaccggcgacgccagcgctttctcgacttcatcgctgtataagtaccacatatcctcccgatcatcgattacgccttgtttttgaagcagcccgccgattttcagaaggcaaaggcgcgctttggcgtccagcatcgcatcaatataaaaatggtgatcatctttgatgacggatgaagacaatgtccactgataatagcggtcaaacgtctcccggaagccgtcatcttcaattctatccataaagtcggcgtagagctgttttcgtttttctatcgttttatgaaactcactgtcaaaatcgtatccgttccggacatagttctgaatgttggccaaagcgaaataagggttttccgcccaagtttcttcaatgagatcatgacttttcacggatctccagccgtattcctgtaaaaattcaccgacttgttcgagaaagcgttttccctcatttgattgcagaagcgtctgatgcagctcatcggcatgagaaaccgtaaagacgcgccgcagctcagggctgtcttttacttgtccggaaagcagccacagctgtctgtcggtctccaatgacttattcatgacgccagccagcatttcgtacagaagggaggtgttttctttctcaacctgtccgtacatggattccagtatcatgtttaacgcaacctgcggaaagacaatattgaaatgttctgcgtatccttttaaatagaagtcttgcaggtttcggaacgcatcaagggcagtctccggcgtatggtctgtatgcgccagttcgtccagcttttgataaaaaggcagaaaggtttcctgaataatattgtacatgcggtcagccaagacggggaaaagcgcttctaactgttctgcgggcagcttgtcgtccgtcttatgctgtctggaaaaaacacgtccctgatgaagtttgacacgctcgatttcgatgcccattacagggaatgccttcgtgctctctttgaggccgtattccaaagccggcacaatgagtgaggcgaataacgggctgacggggccttctatattggcctccatattgagccaaaaatctttctgatcctggggcgtcataataaattcccgttcttcgtctgccgctttctgatcctgcacgatcgttgtaatcggcctggcctgaagcagatacagcttattttcggcaaatccgaattcgagatccacgggataaccgtacagttcttccgtctttatcgtcagcatggcaagctccttgatgctctcgtcatcaaggcagaagcggtttctcatgtcagcggtcgtctctttttccgtcacgccttcgtctttagaaacgatatacatttcttttaagccgatttctttttcaatctgaaatgtgtctttattgacgataaatgtgtcgggcgtcacgctgccggagacgattgcttctccgagaccgtagctcgcgctgatcatcagttctccgtcatcgtgtgtgacggggtttcggctgaaaatgactcctgaaacctcggaattgataagcccttgcacgacaacgcccattaatggttctgcggtgtcattgttcattttctctttataaccgctgacccgcgccgagaagaaggaagcccagcattctttcacttttccgagaaactcttcttctgttttgatatttaaataggtttcgtactggcccgcgaaagaagccccttcaagatcttcggacgcggaggaggaacgtacggcgacagaggcgtatgattctctcaattcataaaacgacgcggtcagttcctcccgaagctcttttgaaaacgtgccgttcataatggcgcgctccatctgttcctgatctgcttgaagcccgttgtcttccataaaacgtgtcagggcattcgtctgaatgatgaaaccgccgggaacgggcagcccgttttttgtcagtttaatcaggttcattccttttgctcctgcagagcggctcgattctcccgctttttgaaatcgcactgaatacatgcggtatgaccccctttttttcttcatccaagaaaaatgatagtaaacactatcattacattgtaaagagggaggaagaaactgtcaaagatacaaagacctaaaccttctcatcctttcggctgaagaaaggtaattcgattcatctggttaatggttcaatggatttatattcacaatttttttgacagatgattgaagactgctgaaaaagggtattgtgatagcaggggaacgattgtccgattcttcattttttactataatcagatgagatgaagaattcccgaggagggtttttgtgattacaaaagccgtttttgcattatgtttcccttttatgctggtcgtcctttttacgcgcgtcacgtttaaccactatgtggcgatcgctctcacagccgcactgcttttcgcatcctatttaaagggttacaccgaaacgtattttatcgttggattggatgtcgtatcgctggtggccggagggctgtacatggccaaaaaagaagcagacaaaaagaaagacaatgcctgacatggtgaatatgaaatagaatgcctgcttttacgccataaaagcaggttttttatacaaaaattgacttggtaaaaataaaccatcgaactttagttcgtatttttagtgattttgcccgtcattgtgttactatatcaataggaagatttcgtaaagaaacggaggcttttttgtgaaagatcgttttgagttagtctcgaaatatcagccccagggagatcagccgcaagcgattgagaagcttgtcaaaggcatacaggaaggcagaaaacaccagactctcctgggtgcgacagggacgggcaaaacctttaccgtgtccaatctgattaaagaagtgaataaaccgacactggtcattgcccataacaaaacccttgccggacagctgtacagcgagtttaaggagtttttcccgaacaacgctgtcgaatattttgtcagctattacgattactatcagccggaggcgtacgtgcctcaaacggatacttttatagagaaagacgcaagcattaatgatgaaattgataaactgagacactccgcgacatcctctctgtttgaacggagagatgtcattattatcgcgagtgtgtcatgcatatacggtctcggttcgcctgaagaatatcgggaaatggttgtgtcgctcagaccggaaatggagattgagcgaaatgagctgctgagaaagcttgtggatatccagtatgcccgcaatgatatcgactttcagcgcgggacgttccgcgtgcgcggagacgttgtggaaatctttccggcttcccgtgacgaacattgtatcagagtggaatttttcggagatgaaattgagcggatcagagaggtcgacgctttgaccggagaaattctcggcgaccgtgatcatgtcgcgattttcccggcttcccacttcgtcacccgggcggaaaagatggaaaaagcgattctgaatattgaacaggagcttgaggagcgcttgaaagtgatgcacgaaaacggcaagctccttgaagcgcagcggcttgagcagcggacgagatatgatcttgaaatgatgcgggaaatgggtttttgctcagggatcgagaactattcaagacatttgacactccgaccgccgggctctacgccgtatacgctgcttgattattttccggacgattttatgattgtcgttgatgaatcacatgtgacgattccgcaggtgcgcggcatgttcaacggtgaccaggcgagaaaacaggtgcttgtcgatcacgggttccgcctgccgtcagcgcttgacaaccgtccgctccgattcgaggaatttgagaaacacatgcacaatatcgtgtacgtgtcggcgactccgggaccgtatgaaattgagcatacgccggaaatgatcgagcagatcatcagaccgacgggactcctcgatcccctcattgacgtccggccgatcgaaggacagattgatgatctgatcggcgagattcaggcgaggattgaacggaatgaacgcgttctcgtgacgactttaacgaaaaaaatgtcagaggatctgaccgattatctcaaggaaatcggcatcaaggtcaattatctgcattccgagattaagacgcttgaacggattgaaatcatccgtgacctccgcctcggaaaacatgatgtgttaatcggcatcaacctgctgagggaagggcttgatattccggaagtgtcacttgtcgccattctcgatgcggataaagaaggcttcctccgttctgaacgttcgctgattcagacgatcggacgggcggcgcgaaacgcggaaggccgcgtcatcatgtatgccgataaaatcacgaattcgatggaaatcgcgattaatgaaacgaagcgccgccgggaacagcaggagcgctttaacgaaattcacggcattacgccgcaaacgatcaataaggaaatccgcgatgtgatccgcgcgacgcaggccgctgaggataaagaagaatataaaacaaaagccgcgcctaaactggcgaagatgacgaagaaagaacgccagaaagtcgttgagcaaatggagcacgaaatgaaagaagcggccagagcgcttgatttcgagcgggcggcagagcttcgtgatttactgttagagcttaaagcggaaggatgatgaacacatggcaattgaccggatcgaggtgaaaggcgcaagggcgcacaatttaaaaaacattgatgtaacgattccgcgggatcagctcgtcgtcgtgacggggctgtccggatcgggaaaatcatcccttgcctttgacaccatttacgcggaaggacagaggcggtatgttgaatcgctttctgcctatgcgcgccaatttttagggcagatggataagccggacgttgatgcgatcgaagggctttctccggcgatcagcattgaccagaaaacgacaagccgcaatccgcggtcaaccgtcggaacggtaacggagatctatgattatctccggctgctgtacgcgagagtcgggaaaccgcactgcccggagcacggcattgaaattacgtcgcaaacgattgaacagatggttgaccggattcttgaatattcggagcggacgaagcttcaagtgcttgcgccgatcatctcaggcagaaaaggcgcccatgtcaaagtgcttgaccaaatcagaaagcaaggttacgtaagggtgcggattgacggagaaatggccgagctttccgacgatattgaacttgaaaaaaacaaaaagcattccattgaagtagtcattgaccggatcgttgtcaaggaaggcgttgccgcccggctttccgactcgctggaaaccgcgctccgtttaggggaaggccgtgtcatgatagatgtcatcggtcaggaggagctgatgttcagcgagcatcacgcctgtccgctgtgcggtttttctatcggggagcttgaaccccggctgttttcatttaacagtccgttcggcgcctgtccgacttgcgacggtctcggcttgaagctggaagtggaccctgagctcgtcatccccaatcccgagctgtcattaaaggaacacgccatcgcgccgtggacgccgatcagttcacaatattatccgcagttgcttcaggcggtctgccgccattacggcattgatatggagactccggtcaaagacctgccgaagcatcagcttgataaagtgctgtacggcagcggcaatgaacggatctactttaaatacgagaatgatttcggacaagtgcgcgaaaatgaaattgaatttgaaggtgtgctgcgcaatattgagagacggtataaagagacaagctccgattatatccgtgaacagatggagcagtacatgtcacagaaatcgtgcccgacgtgcaaaggctaccggctgaagaaagaagcgcttgccgttttggtcaacgggcgtcatatcggaaccattaccgaactttctgtcggcgacgcgcttgaatttttcaaaaacctgacgctgtctgagaaagatatgcagattgccgatttaattttaagagagattgtggagcggctcagcttcttagataaagtcggtcttgattacctgacgctgagccgggcggcgggcacgctgtcaggcggagaagcccagcgcatcaggcttgcgacgcagatcggctcccgtttgtcaggcgtcctgtatattcttgatgagccgtccatcggccttcaccagcgtgacaatgaccgtctgatcagcgcgctgaaaaacatgagggatctcggcaacacactgattgtcgttgagcatgatgaggatacgatgatggctgccgattatttgatagatatcggtccgggcgccggcattcacggcggccgcgtcatatcggcggggacgccagaagaagtgatgaatgatgcggactctctgaccggacgctatttgtcaggggctcaattcatcccgatgcctccggagagaagaaagcctgacggccggttcattgaaatcaaaggcgcttcagaaaacaacctgaaaaaagcgaacgccaaattcccgctcggcacttttacggcggtgacaggtgtgtccggttccggaaaaagcacgcttgtgaatgaaattctgcataaggcgcttgcgcaaaagcttcataaagccaaagcgaaaccgggaagccataaagaaatcaaaggccttgaccaccttgataaggtgatcgacatcgaccaggcgccgatcggccggacaccgagatcaaatccggcaacttatacgggcgtgtttgatgatatccgcgatgtattcgcgcagacaaatgaagcaaaggtgcgcggctataaaaaaggccggttcagttttaatgtaaaaggcgggcgctgtgaggcctgccgcggcgacggcatcatcaaaattgagatgcatttccttcctgacgtgtacgtcccgtgtgaagtgtgccacggcaaacgttacaaccgggagacgctggaggtcacatacaaaggaaaaagcatttctgacgttctggatatgacggtggaagatgctctgtctttctttgaaaatatcccgaaaatcaaacgcaagcttcaaacgcttgccgatgtcggactcgggtatgtgacgctcggccagccggcgacgacgctgtcaggcggagaagcgcagcgcgtcaagcttgcttccgaattgcataagcgttccacaggccggacgctgtatattctggacgaaccgacgacaggactccacgttgatgatatcgcaaggcttttggttgtgcttcaaagactcgtcgataacggtgataccgttttggtcattgaacacaatctcgacatcattaaaacggcggactacatcgtagacctgggacctgaaggcggagcgggcggcggcacgatcgtagcctccgggacgcctgaagaagttgtcgaagtgaaagaatcatatacgggccgctatctgaaaccggtaatggaacgtgataaaaaacggatgaaaacattgctggctgaaaaagaaacggcagccacataatagatcaataaaaacagcccaaaactcaccggttttgggctgttgtgttacaggcttttttctgttggggaagctgtctgcttaaatgcattaagtcctgcagaatatgggtgctgctgctgtccagcagcacttttatatattggatatcatgggaaatgggaagaggggctgctttgatctgttccaattcagccagcatttcgctgttcattcttttctgttcgcgaattaaatttagaagactctcttccgttacttgggcgttttcgggatctttctccatttgtatgtcctccttgcatacggtcaggctttgttacatattgtaatcggttcggggaaaagattctatagtgaaatctctgaaatcaaaaattacgtataacgaagcatgtccttagcatgaaaatgaaacccgcccattcgtcatacgtatgtataaggaagggtttttacatcacggcacagggagtgtttttattgaaccgaaatcaagcgattatcgcatcaatctgttatttcagcgtgtttctcgcgccgctcattcttccgattgtggcttactttgtcgtcgatgaaaaagagacgaagcggcatgccatgcgcgctctgatttcccatatcattccgtttgcgggattgctgattgtgaccgcgggtgttgtcggcggattgattacggctcagggggagagtatggtgcccgtttttgttatgataacaggagcagctgtttattttctgatcctcatcggaatggtcatttggaatatcgtgcagggaattaaggtgttacgccaggtgtaagaaaagtcgggggaggcgttttgtatgaaacaggagaaagaacggattttaaagcttgtggaagacggcatgctgacggcgcaggaagcactgacgctcattgaaaaactggatcatgaatataaagaaaaagaagagcagatcaccgcattatctgcggaggtccaggaacctgcggaagatttcgaaagcggggcaaaaggaagccaaaagccgtcgctcggggcgaagctgttcgactggattgattctgccgtcaaaaaagtgaaggaagcggatcttgatctgaatttcggccacgcacacgaagtgcagcatatttttcaatttaaagacagtgaattctcggccattgatatgcagattgcaaacggcagcgtcaatatcgtgccgtgggcggatgaagatatcagagcggagtgccaggcgaaagtgtaccgggcggacagtcaggaggcggcgcgcaccgcatttcttcagcacattgagtgtgaagtgaagggcaataagttttttgtccgcacggaaaagaaaacgatgaaaaccaatgtcacgctttatgttccccagaaagagtacgataagataagagtgaagctgtttaacggaccgatcagaggggaacatttacatgtaaaagaattctcggcgaaaaccacaaacggcgttctgtcattctctcatttgacggctgataaagcgtcggcggaaacagctaacggacaaatcaagctggccggacatcaatgcggcgcgattgaagcggaaacgatcaacggcttgattgatttgcgcggatcgagtgaatccattgacgttcaaagctttaacggcaatatcatgcttaccgtgacagcgccgcactgccgctccatctacacgaaaacgacgaccggaaacgtggagatcgctctgcctgatgattcggcggtgaaagcggagctgaaaagcaatctcggctctctcagccatgagctgattgatgcggaaattttaaaggaaaagaatgataccattcaaaaagaactgatgctggcatcaaatcaaggccatgatcagcatctctcgattttctcagaatcgttaacaggagccattaagctcaagcatactcagaggtgattggatgaaaagactttaccgttcagaaaaaaaccgtaaaatcgccggcgtcgtcggcggtttggcggagtacgtcaatatggatgcgtcgcttttgcgcattatcaccgttgtattagcgcttgtcacgagcggaatcgtgccgattgtatatattatctggtgttttgttgtacctttagaaggagatttgaaataaatgatcaaatgggcagtcagcattttagtaaatgctttattattaatcgttatcgcgggatattttgattccgtccatatcagcagtatcggagcggctgtcatcgccagtgtggttctttctgtgttaaatgtgctgatcaaaccgatcatcatcatattgacattgcctgtcacggttgtgaccctcggcctctttctgtttgtcatcaacgccattacgttaatgatgaccgcagccttgatgggagacagctttcagattgacgggttcggcaccgccatttgggcgtctgtcgtgctgtccgttttccacttgctgatccaaaaaggcatattggagccgcttagaaaaaggtaaaaaacgagctgtcccgagagggcagcttttttatgtgtgatttacataagcggcagcctcctgacgcaacataatgtatagggaggtaatgagatgaaacttgtgatgacgctcttttttctgattggtttgctttgtgtgagtccttctgcggatgcggcgcgcaaagaatcggcaatccccgtgaatcagcaggaattcggacagccgcctcattacataccgcttctggagaatcctccccaaatcgaagtaaaggcggaaatgaaaagaaacctgttcatacaggctcatgtacggaatgctgactatcaagcgttttcggcgtttcttttttataaacaaagcaatgagctggggtttaaaatggtgccgatggagcccgcgccaggcgcaatccggctgtttacggcccagatttcaaaacgggatatctggaatggagaattggaatattacctcgttttcaccaacggcagacagcgggcggaatcggagaaaaagcggctgaagctggacggctatcaagccgatttgaatcatattcccgagctgatgattacggagcttgcggttgatacgaaaaatgaagacggcgctgatgcctatgaatttatcgaggtgtataacacgacggacaggcccattcattttaaagactatcacatccgctaccgctatccgaaggaagggccggaatcagacatgatatggaggccgaaagaagataccgtcattccgtcaggcgggacttacgtgttttggctgagacgcgccgcatcagaactgacgatagatgatttcaaccgctattacgggacacgcctgaaggagggaaaacatctcgccgtcatcgaagggacggacggaatgtccaacggccgcccgcgtacggtggtgctgtcggcaaataccggcaaggatatcgcctcggcgcaataccggaaacacgctttccgccggctgacttctttgctgtacaaatatccgctgaacggaacgggagaattgctgaggatctccacgagcgagcataagccgtcaccgggctctgtttttcaggcgcagatcccgcagcagaaaagggtgataaaacccgacaaggaaaaaccggtcatcgaagaccttacagacagaaagcccgtccggcccgctgaaagcattgaattaaaggctgacataaaagacaaaaaccttgtcaaaacagccgcgttttattaccggaccaatgagaaaaaaccattcaaacgaattctggccgaaaaagaccgcaacgacagcttataccatcacattctttattccccggagctgctcggccaggatcagcttgagtattatatcgcagccagtgatggagaaaatgaagcaaaaacgcccgtcaaaatgattgacattgaacagacgagcaaatcacacggactcagaatgaatgttgaatccgaagatacgatatccggcacctatctgctcaaagcgacttccgacgtcagcgccgataagatcaagctgtggattgacggcaagcggcaggagacccggccggcgctggaaaaagaggtctatttcgccttcgatgcccggaaaacgaatctttattttcaaaacaccgtcataatggaaaatgaggtgctgcacatttttgacgatccgtctcaccgctacagaacgcactcggttctccttccggaacgtctgctgcaaaaagggggcaaaacgcagaaagtatccatccgttcgggctcaaaggtttctccgtatgacacgggagagaatcgggatgattttgtcgtgaaacatgcccgtctggtgctttcggacggaacggtgatcaaagacgggaagacggatccggctgagcagctctttatcggtgacggcaggcgggcgaatcagcagaagaccttctcattcagcctgccggatcatttgtttacgtcacggctgctgccgtggaacacggcgaagctttctgaaggctatcaccatatttttgttagcgacggggaggagcagctgagccaatctgtgcgggtggacaatacggggccgaagattgtcccgggtatcaaagaaggcgcggcgctgaaaggtaatgttgagctgaatgcggacatccgtgacaaatggagcaaagtggaagaggtcaaagcgtttttggacggagaaagcattacgctcccccatcacacgtcatcagccgatctcaagcccggaaaacatacccttaccatcattgcggcagaccttgccggaaatgaaacaacgtccgtccgcaccttccatatcaaacgggaggagccgaaccagccggagcttgccgatcaaaaaatcggcgcccacaaagcaaagctgtccgtccgggtaaaagacccgacgaaggatgacatgaatgtatcattttatcgcggcttccgttataccgcgcggaatccgggcagcgtgaaagtgtataaacacgcctcattgacggaaccgccgaggggcataaaagaaaatgaaatgccgtttaccctgccggaaatgaaccgcatctcggcaaatgacggaaaaaccgtatcggcggaaagtatggagcgttttccttatcaccggttcgaagtctccgttgacccgtctatcgacgaaacggatctggccgaggcggtctggaaaggaagctctctgcccagccgaaaggtaaccatgtatatttggaattaccggacaagccgctggcaggaggcggacagcgttcttgccaaagataaaaagccgtttacattaaaagccgccgtttccgcagcggatgtggtgaagaactcaaaaatgaatgtcatcgtgcaggatcaaataccggcgaaaggcaattacacgtttgtctggatgtcggatacacagtattacgcacaagggcacccgcacatttttgacaaaatgacggagtggatcaaagaaaataaggaaaagcacaatattaaatatgtctttcataccggcgatatcgtcgatgattcaatggtgatgaaacagtggaaaaacgccgatcactccatgcggacgcttgacaaggcggggattccgtacggagtgcttgccggcaatcacgacgtcggccataaagacggcacataccgaaccttcggggatttcttcgggagccgccggtttgaacagaacatgcattacggcggatcatataaaaataaccgcgggcattatgacctgctgtcggcaagcgggaacgattttattatgatttatatgggctggggcattgcggaacaagagattgactggatcaatcaagtgctgaaacggtatccggaccgaaccgccatcttatgctttcatgagtacttgcttgtgagcggaaatcgaagcccgatcggggaaacgatctatcgaaaagtcgtcaagccgaatcgcaatgtggcgatggtattaagcggccattaccataacgccatgaaaaaaaccgatgcgcttgacgatgacggagacggaaaaccggaccgcctcgttcaccaaattctgaccgactaccaggacggtccggaaggggggcagggctttatgcgcatgatgcaattcgatcaggccgccaatcaggttcacatgttctcctactcgccgtacacggatgacatcaattactatgacaccgatctgttcgctgataaagacgaattctcagcagaaatggatttacagccgaagaggaaaagggtagcgaccgattattttgaatgcaacgtctatacgaacgaactgctcggtcataaaaaacacgtaaaaagcggaaaaaccgcaaattgggtctgggacggcctgcagcctgattccgtttattactggtacaccgttgttaaggacccgtacaacggcaaaacaatatcaccgttgtggatgttcaaaacgggaaatacgccgtatcgcccggctccggatcagtttgatttcaggcatgcctcaaacccataacgaaaaaaatacagcctgctgatcgctcagaagaaaatctgacggtcagcaggattttttctgtgcgtaaatggcggcgccctgctgtgataagtgcttttgacttttttatgtcccttttctatactaaaatcgattggttttcgtaatatgcaggaggaaacataatgaacagtaaaaccgggacaaaagaaagaattattcaaacctctgcatatctttttcagattcagggataccatgcgactggtttgaatcaaattataaaagagagcggagcacccagagggtctgtgtatcatcactttccaaacggaaaagcagaactcgccattgcggcgatcaaacatacgggaagatgcgttgaaaagcaaatacagaatagtatgtctcaattcgcggaccctatagaagcgattcagcactttattcatgtaacggctgaacagtttaatgatccgcagaatattgagggcgtgccggttggattgctggcgggtgagaccgctctgatcaatgaaacgttaagatgcacatgtgttgaggtgttcaagaagtggacggatgtgtttgcggcaaaatttcttgagcatgggtttgaacaagaggaagcggagaagctcggggtgacaatcaactcgatgattgaaggcgcaatcatgttttcactggctcataaaaacaaagaaccgctgctgctgatttcaaagcaggttccgtatattgtccaaaacagagggtagcattttattactcttttctttataaaaatagatatcagaaccccagcctctccgttttgacagagtcatagagaacattcaccggcttgatttgaaaatggcagatcaaaaaaacatctccaacccgtaacggttggagatgtttcatttcaccctgtccatataatgcacgaatgtgtagcggtcgcctctgtaggcggatttgacgtgctcaaaggcagtgccgtcctgcagataagtggtccgcttgatatagaggacgggggcgccgggctggataccgagcagctcagcttcttcctcggaagcggctcccggttcaagctcttgttttgcccgtgagatcggcatctgattgtacgcttcaatatgctcatacatggatgattgaaaatgggaggcgtccagttttcccgccttgtcaaacgggatgtacgatgcctcaatcgccatcgggatatcatttgccagccggacgcggatgattttatgaagcgttgccggatagccgcatcccaggatagaagataattcttccgtcgcctgaatcagctggtattcggcaagtctgctccccggcttcatgccccggcttctcatatcttccgtaaagcttgtcagcccttgaagcggctgttccatcttcagtttgctgacgaacgttccccggcctttctgcctgtataaaaatccttcattcaccagattggaaagcgcctggcgcaccgtcattcggctgatgccgaattgttcggcgtattcccgctccgacggaagcagcgcatccgcttccagctcgccgtttttgatttgtgtttttaattgttccataatctgaaagtaaatcggaatcggagattgtttatcaatctgcataggtcaaatcctttcaatcgccgcccgcagccttttcatcaatcaagaccgtcacatccggatgcgcgtgcagggcggaggcggggaatgcttcgctgatgcgcccgtccagaagctgcttcaccgcttgggccttgctttttccggatgccatgatcaaaatccgtttgccggacaaaatcgtcccgatccccattgtcagggcttttacagggacttgatcaattgacggaaagtaccgcgcattcgcctgtcttgtctcttcattcagctcaacgacatgggttcgggattcaaatggcgtcccgggttcattaaagccgatatggccgttgtgtccgatgcctaaaagctgtatatccgctccgccgagtgtttgaatcaatcggtcatatcgtccgcattcggcatcaagatcgtctgcccgtccgtcagggagaaagcggcggtcctttcggctatcgatatgtgcaaaaaaatgtgtattcatataataatgatagctgtttttgtcctcgggagaaagcccggcgtattcatcaaggttgatcgtcgtgacatttcggaatgacaagtcttctgagcggtgcatccgcacaagttctttgtatacgccttcaggggtgcctcccgtcgcaaggccgagaacggcatccggcttttgtttcactgtttcagcaataatcgctgcggctttttcacttaattcttcataatgtctgcatgtgataacgttcatgtccaatcagcctcccttgagatatatgcggtgtttccgcggcaaatcgtggccagcacgccgcactgtccgtccgtcagaacaacgtcggcgtcttttccttcggcgatgcttcctttgcggtcgaatatgccgaggcggcgggccgcatttgccgatgtcatatttgctatatccagccatgagcagtttgtaaacctgcgcatgagcgccgcgccttcattcatttttaaaatggaaccggccagcgtcccgtcagagagaagcgccgtgtccccgcgaacggtgactttttgtccgccgaattcgtattctccgtccttaagcccttttgcccgcatggagtctgttatcatgatcaggtttttgcttcctttcgccaaataggcaagcttaacggccaaaggatgggaatgaatgccgtcagtgatcagctccgccgtgatgcggccgcaggcgagcgccgtaccgatgccccccggctcacggtggtgaaaggagctcatggcgttgaagaggtgtgtcatatgcagtgctccggcatccgccgctttttctaaaagatcggctcccgcgtctgtgtgtcccattgacgggatgatgttttggtcttttaaataacggatcaggctgaaatcaggatcttcttccggtgcaagcgtcacgattttaatcagacctccggagagacgctcccatttctgaaagagcccggcatcagcaggagtaatccattgtttcggctgtgctcccgcctttttcggagagacaaacggtccttctaaatgaatgccgatcaactcagcgcctttttggacctgaggtgaggaagacgcccattttttggcgttgacgagcgctttttcaatgttttcgtgctgctgtgtgatcgttgtcgctaaaaaagaggttgttccttcttcgggcagccgggcggacattgtatcaagagctgcaacatcagcatccatcgtatccgcgccgtatccgccgtgaatatgaatatcaatcattccgggaagcgcatacgagcccgcgggcgccttccattccttctcatacgtttcttgcggtcttgttttccccgcgtaagaaatgatgccgtcctttataccgagaaaaccgtttcggatgatttcttcttctgttacgatgtccgcaccgctgattaacaagctttcagccactttaaaacacgcctttctggttagttgttagttttattttactctttttcagactagttatctagaccagttatgccggaattgtataaatctgttttggttcagacggtaaagtgataaaatataactgttcaaagctcggaacatcccagaacaggaggaacatatcttggcaaaggttcggaccaaagacgtaatggagcagttccatttagaattgatcagcggagaagaagggattaaccgcccgattacgatgagtgatttatcacggcccggtattgaaatcgccggctattttacatattacccgagagaacgggtgcagcttttaggaaaaacggagctgtcatttttcgatcagcttcctgaggaggataaaaaacagcggatggaatcgctgtgcaccgatgtgacgccggctatcatactttccagagatatgccgatcccgccggagcttgtagaagcatccgagaaaaacggcgtgcctgtgctcagatcccctctgaaaacaaccagactgtcaagccggctgacgaattttcttgagagccgtctcgcgccgacaaccgccattcacggcgtgcttgtggatatatacggcgtcggtgtgctcataacgggaaaaagcggcgtcggtaaaagtgaaacggcgctggagcttgtcaaacgcggccatcgtcttgtcgcggatgactgcgtcgaaatccggcaggaggatcaggatacgctcgtcgggaatgcgcctgatctgattgagcatctgcttgaaatcaggggtctcggcattataaatgtcatgacgctgttcggagcgggcgccgtcagaagcaataaaagaattacaatcgtcatggaccttgagctttgggagcaagggaagcaatacgaccgtctcggacttgaagaagaaaaaatgaaaatcattgatacggaaattacaaaactgaccattccagtccgccctgggcgaaatctcgccgttattatcgaagttgcggcgatgaacttcagattgaagcggatgggcttaaatgctgccgagcaatttacgaataagctggcggatgtcattgaagacggcgaacaagacgaataggagttggcaataatatgaacgaagcaggaacaccaatcaatccgattgccttgcagctcgggcctttatccgtgcactggtacgggatcattatcggcgcgggtgcgttattagggctttggatggccatgagggagagtgaaaagcgggggctgaaaaaggacatttttattgatcttgttcttttcgccatcccgatcgcaatcatttgcgcacgggcatactatgtgcttttcgagtggagctattactcggaacaccccggggaaatcattaaaacctggaaaggcggcatcgcgattcacggcggattgatcggcgcgatcgcgacgggaatcgtcttttcaaaagtaagaggcatctcattctggaagctggcggatattgccgcgccgagtattctgctcggccaggccatcgggcgctgggggaactttatcaaccaggaggctcacggtgaagcggtcagccggtcatttttggaaagtctgcatcttccggatttcatcattaatcagatgtacatagacggacaatattatcacccgacgtttttgtatgaatcgctgtggagttttgcgggcgtcgtgattctgcttctgctccgccgcgtgaacctgcgcaggggcaatctgtttttgacgtatgtgatctggtattcgatcggcagatactttattgagggaatgcggacggacagcctgatgcttacgagccagcttcggatcgcgcaggtcatttccattgtgctgattgtacttgcgattattttaatgattttcagacgcatgaaggggtatgccgataagcggtatgctgatacggactgacgcctgaaatcggaaaggacataagatgactgataaacgtgtaaccgccattttatttgatctcgacggcacgctgattgacacgaatgaactgattatcgcttcttaccttcatacgcttgatcattattgcccggggcagtttaaaagggaagatgtgcttccatttatcggcccgcctctgtatgaaacgttttcaggcattaatgctgaaaagtgcgatgagatgatctgcatgtacagagcattcaaccatgaaaagcacgatgaactcgtcacggagtacgaaacggtttatgaaacgctggatgaattgaaaaaagcgggctatcagcttggtattgtcaccacaaagctgagggatacagtcaatatgggattgaagctgacaggcatcggggcgtttttcgatactgtcgtcacgcttgatgatgttaagcacccgaagcctgaccccgaacctgtgcggcttgctctcagccggcttgggtgcgatccgtcggaagccataatggtcggtgacaattatcacgatgtcatggcgggaaaaaacgccggcacgaaaacagccggcgtcgcgtggacgattaaaggcgcacagacgctttccgcctatgaacccgattatatgctcgagaaaatgagtgatttattgcacatcaccggagtgaagtaatccgtgagaaaaacagaccgccatccggtttcaggtgcaaattcattgtggcatgtttatcagacggttccctttctgaaggtgatgaaaaatttcatcatcattcagatcgcaaggtatacgccgtttttaagcgtgaaaaactggctgtaccgaacctttttgaaaatgaatgtcggaaaacagacgtcattcgcgctgatggtgatgccggatatcatgtttcccgaaaaaatcactgtcggaaaaaacagcatcatcggctacaatacgacgattttggctcatgaatatttaatacatgagtaccggaccggttttgtcacaatcggtgacgaggtgatgatcggggcaaacacaactattctgcccggcgtcaccatcgggagcggagccgttgtatcagccggcacgctggtgcacaaagatgtcccggccggggcgtttgtcggaggaaatccgatgcaggtgatctatacggacgaagaaatgaaaaaacgaatggaaaaccccgctgattaacgtcagcggggtttttttatgacttgatcacaatggcctggctgcccatctgcttccaggctttttcaaagtcagatcggtttgtttttctgtttttatagccgtaaggatcattaacgtatacataatcgtgatcataaccggtaacggctacgctatgcatgctgaacgtaatgtcgatttttccgttcggcgtattccaagtctgcatattatcaaccggcttaaaggatgtggtggtaatcacccagaccggccgccctttttcaagctggcggtacactgaagaaatgtcttttcccgtcagatcgtatactttgtttcccgcatattctttggcgagtttatcaatcggctcatgataaacgcctaaacccgggccgttttccatatctccggcaaatccttcattcggatctcccttcagcccgctgctgtatgtgagcggaactttattgattttatccgccaatgtattttttgatacatgatatccggcattgttcaaaatcatagcaaggcttgtcacctcacagccattgtacagtctgggagaatccatctgtctgtacagaacgacattcagcggtgacgcgctcccttttaacggtgttttctcatcaggctcgtcggactgctgattaaaaaaattcaaatgaatatcgtttgtatagatgttatacccgagatagacaaggatggctgtcagaatcaccacacataatgttccaagcgtcttcattattactctcccttgtttctgatgaagctattctatgtattatagcacttctgctcaatatgattcgatcgttccgatatgtttacaggtttgttcattctttagccatgtttatggaaaagaataggcggacattgggcgttgcaattcattcttttatctgctaacatattatcatattagcgaactaaaggattcggaattttccttcagacaaagcggaggtgtaaaaggcaaatgtttatgtttgagaaaccgcatggcatgagagatacgctgcccggtttatacgaagccaagaaaaaagtccgttccacactgacggatttaattgataaatggggttatcagtttatggagacgccgacccttgaattttatgaaacagtaggcgtccagtcagccattgaagaacagcagctgtttaagcttctcgatcaggacgggaaaacgcttgtgcttcggcctgatatgaccggaccgattgccagggtggcggcgtctaagctgcacaaacacaatcatccgctcagagcggggtacgcggcaagcgtctatcgcgctcaagagcgggaaggcggacgtccggccgaattcgaacaggtcggcgcggagctgatcggcgacggatcaacaagcgcggacgccgaggtgattgcgctggcggtcggcgctttgaaaaacgcgggattgcaccggtttaaaatcgcgatcggccatgccggactcgctgatgagctgtttgtcgaggttctgggcaatgctgagcgggcggatgttctgcgacgctttctctttgagaagaattacgtgggatacagggaacatgtcaaatcgcttccgctttcttcaatagataaaagccggctgctcacacttctggaattgcgaggcgggaaagagatctgcgccaaagcggaggagatcatcggcatctccggacaaagcttgattcaggagctggaagacctgtgggacattcttgaggattacggatgtgccgagcatattcgccttgatctgaatatggtaagccatatgagttattacacgggaattttattcgaagtgtatgcggcaaatgtcggttttgtcatcggaagcggcggacgctataacaatcttctcggccatttcggcagtcccgctcccgccacgggtttcgggctccgtatcgacaggctgattgaagcgctcggcatccaggaagaaactagtgaagcggacgccgtgattttcagcaaggagcagcgggcgcaggccattttattcgcggaggaagaaagggcgagaggcagaaaagtcgtcctgcaggatctggcgggcattgaaaatatcgatcatatgacaaaatcatttgcaaacgtcacatactttatcggtgccagaaaggaagagcagaatggataaggtactcacaatggcaatgccaaaaggacggatattcgaagaagcggccgggttgctgcggcaggccgggtacaggctgcccgaggagtttgaagaatcgagaaagctgatcattgacgttcctgaagaaaatctccgctttattctggcaaagccgatggatgtgacgacttatgtcgagcatggcgtcgctgatgccggtattgccggaaaggatgtcatgcttgaggaagagcgtgacgtgtatgaggtgctcgatctgaaaatcagcaaatgccatctcgccgttgcggggcttccaggagcggattggaacggagtcgccccgaggattgcgacgaaatatccgaatgttgcgtcaagttatttcagagagcagggcgagcaggtggaaatcattaagctgaacggttcgattgaattggcgcctttaatcgggcttgctgacagaatcgtagatatcgtatcaaccgggcggacattaaaagaaaacggtctcgttgaatcagaacatatttgtgacatcacatcgcgttttatcgtcaatccggtcagctaccgcatgaaggatgatgtaatcgacgaaatggcggccaggctggccagggttgtggaaggagaaacggcacaatgaaaataacggcagtaaaaagaagcgagcggttctcactgaagcgttccatcgacagcggaaccgaagagcagcggaaaaccgtcagggggattattgaagacgtcagacaaaacggtgacaaagccgttttggcctatacaaaaacatttgacggcatcagcctgaaccaaatggccgtgagtgcagaggaagtcaccgaggcgtaccgtctgcttgatgatcagctgctggaagtgatcagacaggcgattgccaatattaaagaatatcacgaacgccagctgcaatcctcgtggttttaccatcgcaaagacggctcgatgctcgggcagaaaataacggcgctcgattccgcgggcgtatacgtgccgggcgggacggcggcttatccgtcttccgttttaatgaatgtcatccccgctctcgctgcgggagtggaacggatcgttctcgtcagtcctccgggaaaagacggccgcctttcgccgggcgttctggcggcggcgtctgagctcggcataaaggaaatttacaaagcgggaggcgcgcaggcgattgccgcgctcgcttacggaaccgaaacgatacagcctgttgataagatcacgggccccggcaatatatttgtagcactcgcgaagcgcgaagtcttcggcgttgtggatattgacatgattgccgggcccagtgaaatcgtggtccttgcagacgatacggcggtgcccaaagaagtcgccgctgacctgctttcacaggccgaacacgatacgctcagctcaagcgtgcttgtcaccgactcacggaagcttgccgaagccgtatcagatgaggtgaataaacagcttcagacgctgccgcgtaaagaaatcgccgaagcgtcgatcaaggatcacggccgcatttatatcgcggaatcgatggaagatgcagtggacacggtgaatgcgctggcgcccgagcatttagaaatcatgacgcattcgccggaggctttgcttggaagcatcagacacgcgggggcgattttcttagggcgatacagcgctgaaccggtcggcgattattttgccggaccgaatcacgttttgccgacaaacggaacggcgcggttttcaagcccgttgaatgtaacagattttcaaaagaaatcgagcatcatctcatacagccggaaggcatttgaaacgcacgcggacagcatttccgccttcgcgagactggaagggcttgaagcgcacgcaagatcgattgaagcgagaaacggaggaatgaccgatgagaaaagcggaacgcgccagaacaacaaatgagaccgatattaagctggctttcgaaatagacggagaaggaaaagccgacatcagcacggatgtgccgtttatgactcatatgcttgatttgttcacaaagcacgggcaattcaatttaactgttgacgcaaaaggcgatacggagatagatgatcaccacacgactgaagatatcggcatctgcttagggcaggcttttttggaggcgctcggtgataaaaaagggatcaaacggtacggatcagcgctagtaccgatggacgaagcgctcgcccaagtcgccgtagacctgagcaaccggccgcaccttgagatgcgcggtgcatttccgcaagcgaaagtcggaacgtttgataccgagctggtacacgaattcctatggaaactggcgctggaagcgagaatgaatctgcacgtcatcgttcattacggaacgaatacccatcatatgatagaagccgtgtttaaggcgcttggcagagcgcttgatgaagcgtcatccattgatccgcgcgtcaagggtgtgccgtctacgaaaggaatgctgtaaatgatcggtgtaattgattacggtatgggcaatttattcagcgtgtcgaaggcgctggaacgcgtcggtgtcccgtatgtcgtatcagaccggccggaagagcttgaaaaagcggatgcttttattctccccggtgtcggatcattcagtgacgccatggacaatttacgcagcgcgaagcttgatcaattcatacaccgtatggttgacgagggtaagctgctcctcggcatctgcctcggcatgcagctcattttcgaagaaagcaccgaaaacggctctgcaaaaggactcggtttattagccggaaaagctgtgagactcaaagacagagatgccgaaggaaacaagctgaaggtgccgcatatgggctggaaccggctgacgtttcaccaaacgtctcctttgctttcggaagcggaagaaggcttcgtttactttgtccattcctattatatagacgggatggaagacggcgatcttctggcaagcgctgagtacggcgttcgtgttccggcggtcgtcgggaaacgcaatgtcttcggtgcacagtttcacccggaaaaaagcggtacggccggaatggcgatcttaacgcaatttacaaaaatggcagcggaacagaaggtgaagaaatgaacgcttttacattatatccggcaatcgatatgagaaacggcaaatgcgtccgcctcatccaaggcgattacggcaaggaaacgatatacggtgactctcctttagacatggcggcgcaatttgcacaagaaggcgccgaatggattcatctcgtggatcttgacggcgcgaaagcaggcaggaaagtaaacgacaggcatgttcttgacattgcgcggcagcttgatgtcaaagtcgagatcggcggcgggatccgttctgaagcggatgtgtacggttatttatcacaagatgttgatcgcgttattctcggcagctcggctgtttccgatccggcatttgtgaagagcatgctgaaacaatacggcggcaaaatcgcgatcggtcttgatgcaaggaacggatatgtctcgacggaaggctggctggaaacatcctcggtaagggcggccgatctgggccgtgaattggcgaaggaaggagcggaaaccttcattttcacggatattgcaactgacggcatgctgtcaggaccgaacatcgaaagcaccgttcagctcgcaaaagcaacgggaaaaaccgtcatcgcttcaggcggagtcagctcagtcgccgacctcaaagcactggcccgcttcaaagacgccggcgtatcgggagcgattatcggaaaagcgctgtatacaaaacaatttacattggctgaagcgctcagcggggtgaaggacgcatgatcacgaaacgaatcattccgtgtctcgatgtgaaagaaggccgcgtcgttaaaggcattcaatttctcgggctgaaagatgcgggcgatcctgtcgagctggccgaagcttacgacagggagggcgctgacgaacttgtttttctcgacatttccgcctctcacgaaggccgcaagacgatgacagacgtcgtagaacaagttgcggcaaaactggcgattccgtttacagtcggcggcggaatcaatcaattaagcgatatgaaacgaatgcttcgcgccggcgctgataaagtatccgttaatacagcggccgtcctccgccccgagctgattacggaaggagcggattttttcggctcgcaatgcatcgtcgcggcgattgacgcaaagtatgatgaagattcggattgctataaagtgtacacacacggcggcagaaagaaaaccgagtgggaagtcacggcctgggcaaaagaagccgtcagccggggagcgggtgaaatcctgctgacaagcatggacgcagacggtgagaaaacaggctttaatcatacgctcacacagcttgtctcacgtgcagtcccggtgcccgtcattgcgtcagggggagccggcagcgcgcgccatatgcttgaagccttcacgatcggtgaagcggacgccgcgcttgcagcttccattttccattacaaagagacatctataaaagaagtgaaagattatatgaagaaacacggggtgaatgtgagatgaaacgggcagatgaactgcggtttgacgaggccggactgattcccgccatcgtgcaggatgcggcaagcaaagaagtactgacactggcttatatgaatcgtgaatcctacgaaaaaacgatagaaacgaaagaaacctggttttacagccgttcacgcggggagctgtggcataaaggagcgacgtcggggaatacccaaaaggtgaaagccatccgctatgattgcgatcaagatgctcttgtcgtgcttgcggagccttcaggacccgcatgccataagggaagctacagctgcttttctccggaaaaagcggatgcgcaggatcgtttcggcatcttaaatgaactggaaagcgtaatcgccaaacggcaggcggagatgcctgacggagcctacacaacgtatctgtttcgggaaggcgtcgataaaatcctcaaaaaagtcggcgaagaagccgcagaggttattatcgccgcgaaaaaccgggaccatgaagaattaaaatgggaagcggcggatttgctgtatcatttgctcgttcttctgcgtgagcagtcgcttcctttggacgacgtgcttgacgtccttgcgaaacgccattcagcatctgagtaaaacaaacctcacggagagatccgtgaggtttttaatctgtcaaacttaaacattcaattaaatattccttatttccgcaaccggaggcagatgaatttgataatattgactaatagagtttattttggtttttatcaaaaatatactttttgttcatattccgttcatgcacatccgttatagtataaacagtgatataggaggaaaacttatgccgaataaacaaccaaaacctaaagggaaattcagctcattcttttcattagtcaaaaaaacaaaaccatcatacggtatgctggccttcgcgctgtctctcagtattgtgacaacgctcgtcagcctgctgattccgctgttgacaaagcagctcgttgacggcttttccatgtcgtcgctgtcaggcgtgcaaatcggaatcatcgcagccgtgtttatcgtacaggccgcattaagcgcctacgccacctacgccctgaactacagcggccagaaaatcatctcgggcctgcgtgatttgttgtggcagaaattaattaaactgcccgtctcttattttgacaaaaacgccacgggagaaacgatcagccgtgtcaccaatgacacaatggtggtaaaagagctgatcacaaacaatatcagcggatttattaccggaatcatctccgttatcgggtcactgacgatcttatttttcatgaactggaagctcacattgctcgtgctgatcgtcgtgccgctggctgcggtgattttagtgccgatcggccggaaaatgtttaaaatttctcgggaaacacaggatgaaacggcgagattcaccggattattaaaccacatcctcccggaaatcaggcttgtaaaagcgtcaaacgctgaagaagcggaatacggacgcggaaaagcaggcatcatggcactctttaaactcgggctgcgtgaagcgaaggtgcagtcgctcgtaggtccgcttattacacttgtattaatggcggcgctggtcgctgtcatcgggtacggcgggatgcaggtgtcatccggtgaattgacagccggcgcactcgttgcctttatcctgtatttgtttcagatcattatgccgatgggccagatcacttcatttttcacacagcttcaaaaatccgtcggcgcaacggaacggatgattcatattcttgcagaaaaagaagaagatatccaaaccggaaaagccattgaaaacgcagatcagccgattaagcttgaacaagtctcattcggctacaaaacagatcaaaccatcttaaaagacattacggctacgattgaagccggcaaagtcaccgcgatcgtcggaccgagcggcggcggaaaaacaacgttatttaagctgcttgaacgattctacaatccgactgcgggcagcatcctgctcggaaatgaaccgattgatgcgtattcccttgagtcatggcgggagcatatcggctacgtgtcgcaagaaagcccgttaatgtcaggcaccatccgcgacaatatctgctacggattaaaacgcgaggtgaccgatgaggaactgaggcaagcggctgacatggcctacgctctgcaatttattgaagacttaccgaagaaatttgaaacagaggtcggtgagcggggaattatgctgtcaggcggacagcgccagcgcatcgccattgccagagcgctccttcgcaacccgagcattctgatgcttgatgaagcgacatcaagtctggacagccaatctgaaaaatgggtgcagcaggcgctggaagttctaatgaaaggccgcaccaccatcgtgattgcccaccgtttatccacggttgtggatgcagatcagcttctctttgtcgaacagggtgaaatcaccggacggggcacacaccatgaattaatggcatcccattcgctgtaccgcgattttgcggagcagcagctgaagctgaatgccgacttagaaaacaaagctgtgtaaagcaagactttatgaatcaaaagcagctgaaaaagctgctttttattttgcagccggagtcctgttcttacgggtgtacggtcggtaacgatgaagagccaagccataagcgtgtatgccggtacaggagacaatgaaaaaattcggtttatagacatcatgtcgattcatgaaaagaaaaaagcagaaggagggattttcatggctgtcatattggttgcggatgatgaccgccatatccgtgagcttgtccgccttatgatggagcagagcggttttgacgtcgcagaagcggaagacggggaagcggcggtgcggctgatcgaatcagcacctatagatctcatcatactggatgtgatgatgccgaaaatggacgggtttgaagtcagtgaagccgtccgcagctttacggacattccgattttgatgctgacggcaaaaggcgaaacgctggacaaagttcaaggttttacttccggagcggatgattatctcgtcaaaccgtttgagccgcttgagctggaagcaagggtcaaagcattgctgaaacggtaccggatcaccgctgaaaaactgctgaccatcggaacggtcacattagataagcaatcccgcactgtaacgcgcggcggcggagcgggattgacattgccccggcgggaatttgagcttttatttaagctcgccggttatccgaataagacgttttcaagagaacaattaatagaagatatttggggctttgattatgaaggtgacgagcgtaccgttgatgtgcatattaaaaggctgagagaacggtttccggaaaaagactatccgtttgccatccatacggtgcgggggctcgggtatcggtttgtggtgacaggatgaaacggatcttcagaacggctggaaaaatcatcatccttctcaccgtcaccgcattcttatggctggcggctcacctgattgttcagggattcggtctcatatggccgattttgcttgtgccgtacgccgagcagattctgacgctttggcttgttttcggcctgctgttcgtaacaatgtttattttttcaaagtcagcacgtgaaaggcatcatgcgatctgggattcgctgaccgccacgatcaagcaaatgtcgagcggcaacttcacagcggccgcttcccggaaaatggagaagattgagcggaaccatcccgtgacgaaattggctgatgaactgtcgacactcgccgcggaactgagtgaaatggaaaaactgaaacaagaatttatttcgaacgtttcccatgaaatccaaaccccgctcacttcattaaagggctacgcgcatcttctgaaaaaaccggatttatcatatgaggagcgggggcgctacttacacatcatcgaaacagaaacagaacgattatcaaaaatcagtgaaaatctgctgaagctcactgcgctcgaacgccaaaccgaaccgatacaaaaaaaaccgttccgcattgacaaacagctgcggcgcaccatattgacctgtgagcctgaatggtccgccaaacagattgagtttctcattgatttacaggagtcgtatgtgtacggagatgaagcgctgctcagccaagtatggatgaatctgattcacaatgccgtaaaatttaccggtgaaggcggccgcatttccgttaaaattgcagatctgccgggagcggcggctgtcgaaatcgccgacgacggaatcggaatggagcctgaacaggcggagcgtgtatttgaacggttttataaagcggacaaggcgagaaacgaaggaggaagcgggctcggcctgtccatcgcccaaaaaatcgcagagctgcacggcggttcgatagaggttgagagcaagcggggcgaaggaacccttttccgcgtcattcttccagccgagcctcgtgaaaaaaacagctaaaatctggtcgaaccagccagtaaaaaacgaagtcgatcctgtcttttgaactattgaggtgaaaccgttttatggtatactactgacggtaatacgtataaaacggaggatatttgtgggaaaacacacttctgaacagaaaaagcacgcgcaaattgtccagctgcttcaggatggacaatatttttttcataaaggcttaaaagcatataaagagcggaatttaaagcgggccagcaaactgattcagcgggccgtccacctcgagccgaatgattccgaaatgctgtcccggctggccgtcatttattctgaaatgggccactaccagcagtcaaatgagctgttcgactttattttggtgaacctgaaagaagaaatgcccgagtgtcattactttaaagcgaataatttcgcgcatttggggctctttcaggaagcatacaaagaagcggcggcttattcagatgccgatccggacggtgaattcagcgaagaaattgaaaatctgatggagctattggatttcggcgaagcgggtgaaaacgaatcgctctatgaccaggatgaactgctgatcaggcaggatcgggcaaaaacgcttcttgagagcggccagcttcatgaagcggttgtcatgcttgaagagattacggccgattaccccgagctttggtctgcatacaacaacctggcgctcgcttacttttactcaggcaatgtcacaaaagcgaaacaaacggtattcgaagtgcttgagaaaaatgaaggcaatctccatgccctgtgcaacctccttgtattctgctattacgagagggaagatgaaaaagtcggagaattgagcggaaaactcgccaatgtgtatccgattttattcgaacagcgctataagctgggggcgacgcttgcgcttgtcggcagacatgatctcggttataaatggctccgttctctttacaaaagcgggtttgaaggcgacgaaacgttttattactggcttgccgcttcagcctacgggacaggccgcacagaatttgcggaaaccatttggaaaaaggccgaagccgaatttcccgaatcagatcggcccgcgccttgggcggagcggcaggaaccgctgcctgcttcacttgaacagcggcttgccgcctattatatcagcagcgctgaaggagagcggaaccagcttgaaaaagttctgacggcaaaacgcgccgtttcaccgtttgaacaagatttcgtcagactgctgctttccggtgaaaaaggcgtttcaggcgtctccggtgatgcgctgttcacgtatcggacggtcaagcttctggagaaagcggaagccgacagtttaaaaactgacgtcatgagctgctgggtttttcacgtcattcagcacatccgcgccgccgctgccgtacagaatgagcgggcatgggccgcagccatcgcatatgtatggaaagaagcaaacggcgaaaaaacgacgaaaaaagaaacggccgccgtttacggtataaccccggcaacactttcgaaatacatcagacaaatagatgatatattagaataaaaccgattctttctatataaagagtcggttctttttttatcagaaaggggcaaaacagaactttaccgccgaaaaaagaggtattcatacgtatttttttgcttttcgaatcgaaaccaggccgtaatcaccgtttattttgcaaaatatgagatttgcaatcacattgaaatataactgtaataaaaattgtcgaaacatgatggtataatgagtctcgtacataagagattagtttattttacatgtgctgtataatctataccaatttaaaagatttaaagattcatacataaaaatcatcagcctcacgggtatgtgagggagcgtaactttgatgttcataatagaattccaaatgagaacaggtttaaagtaaaagggaggaaagaaaaagtgaaaaagagtttattaacacttggtttggcttccgtcatcgggacaagcagttttttgatcccgtttacaaaaactgcatcggcggaaacattagacagcaaaaaagcaaaaattgaaagcaagcaatctgaggtggcttcaagccttgaagcaaaagaaagagaattgtctaagcttcaggacaagcaggctaagattgaaaaagaactgaaagacattaacgctaaagcgttggatacaagcaataaaatcgaagataaaaaagctgaaaacgaaaaaacgaaaaagcagatcgctgatttgaaaaaagaaattaaagaaacagaagcgcgtattgaaaaacgcaatgaaatcctgaaaaaacgcgttcgttctttacaggaaaacggcggttctcaaggatacatagatgttcttttaggggcgacaagcttcggagacttcatttcccgtgcgactgcggtatcttctatcgttgatgcggataaagagctgatcaaacagcaggagcaggataaagcgaaactcgaagacgcagaagctgaacttaacgtgaagctgaaaaaagttcaagatgatcttgcgaaactcgagtctatgcaaaaagacctgaacaaacagcttgatcagaaagacaagcttttcgacgaagcgaaaaacggtcagaaaaaagcggcttccgctatctctgatctgaaaaaagaagcatcaaagcttgcaaacgaaaaagctgacactgaaaaagaacagaagcgcattaaagctgagcaggctgcagcggctgccctgatcaaaaaacaggaagaagcgcaaaaagcttctgaagaccaaaaccaaaaagatgacagccagccggcaccggcggttaaaactgtgaaaaaagcggctgtttcaacatcatctgattcatctgacagctcaagcaaaccgaagagcacttcaggcggatcatctcataacagcggcggttcagatgattctgacggcggatctgttatttcaaattcaggcggtattgaaggcgcgatcagcgtaggatcaagccttgtgggtcaatccccgtacaaattcggcggcggacgcactcaatctgatattaacaaccgtatttttgactgctcttcattcgtacgctgggcttatgctaacgcaggcgttaatctcggacctgcaagcggcacaaacacagatacattaatcggaagaggtaaggcagtaagcgcgtctgacatgaaacgcggagacttagtattcttcaacacgtataaaacaaacggccacgtcggcatctacttaggtaacggaacgttcctgaacgataatacatcacacggtgtatccattgattctatgagcaacccttactggaagaaagcattcaacggcaatgtaagacgtgtcgtggaataatgaataagacaagggccttctatcccggaaggctctttctttatttgtatacccgctcaggagctgcctaatcacggtttttcagaaaaatgagcaaaaaaatagcgaattgccttcagatttaataggatatgggtaaggaatacgattgatggggattcttagtcatatagggtgcgccccatttcgaaaaggagtgaatcatggtgtcagaagaaaaaatttatgatgtgatcattatcggcgcgggtccggcggggatgaccgctgctgtttacacatcacgagcgaacttatccacattaatgatcgaaagaggaattccgggcggccagatggccaacacggaggatgttgaaaactatccgggttttgaaagcattctcggccctgaactttctaataaaatgtttgaacatgcgaaaaaattcggtgcggaatatgcgtacggcgatattaaagaaatcgttgacggcaaagaatataaaacggtcaaagccggttcaaaagaatataaagcgcgtgccatcgtcatttctgccggagcggaatacaaaaagatcggtgttcccggcgaaaaagaactgggcggccgcggcgtatcgtactgcgcggtttgtgacggcgcgttctttaaaaataaagagcttgtcgttgtcggcggcggagactccgccgttgaagaaggcgtctatctgacacgcttcgcttcaaaagtcaccatcgttcacagacgtgacaaattgcgtgcgcaaagcattcttcaggcgcgtgcctttgacaatgagaaaattgacttcaaatggaacaaaaccgtaaaagaaatccatgaggaaaacggaaaagtcggcagacttactcttgtggataccgtgacgggagaagaagaagaattcaaagctgacggcgtctttatttatatcggtatgcttccgctttctaaaccgttcgaaaacttgggcatcacaaatgaagaaggctacattgaaacaaacgctcaaatggaaacaaaagttccaggcattttcgccgcgggagacatccgtgaaaaaacgctccgccagatcgtaacggcgacaggcgacggaagtattgcggctcaaagcgttcagcattatgtggaagagcttgaggaaacgctcaaaaccgttaaataatcactgtaatgttcagtttttgaatcgttactgtgttttaattacgctgtaacacgggtgaaacactgatgtcttaagatgaatgtagtaattgaccccctttttaatgaatacactttggcacggattccagtatccgtgccctttttttgcgattttctgttttctgtcaaataaaagaaaaggatgtcggtgtctctgcattgtgagagacatgccgaaacggtataatgaagagacgatgatttgttgagaaggttaggtgacgtacttgtgcaaagagtgacaaattgtgtgctgcagacagatgatcaggttctccttctccaaaagccgagacggggctggtgggtcgcgcccggcgggaagatggaaagcggcgaatccgtcagagattccgtcatcagagagtacagagaagagacgggcatttatatactaaatccgcagttaaaaggcgtgtttacctttattattaaggaacaggaacaaatcgtgtcagagtggatgatgtttactttcgtcgccgactcgtacacggggcgaaatgtcgctgaatcagaggaaggcgttctgaagtggcatgacgtaaaagatatccacagccttccgatggcccccggagacgggcatatccttgattttatgatcaagggccaagggcttttgcacggcacctttacgtatacgccggacttcgagctgctcagctatcgtttagatccgcagcttatcaaataaaagaaagaccgcaggggggagaaagatgagtatgaatgaaaaccatgatattcagctcgtcatcattacgggaatgtctggagcggggaaaaccgtcgccattcaaagctttgaggatctcggctatttttgcgtcgacaatctgccgccttccttgctgccgaaatttttggagctgatgaaagaatcaagttcaaaaatgagcaaggtcgcgcttgtcatggatctgcggggacgtgaattttttgacaggctgattgaggcgctggatgaaatggcggaaaatccgtggattacaccgcgcattctctttttagacgctaaggattccatccttgtgacgagatacaaagaaacgaggcgttctcacccgctggccgctaccgggcttcctctcgaaggaatcgcgctggaacgccagctgcttgaagaattgaaagggcgctctcagctgatctatgacacatcggatatgaaaccgcgtgatctgcgtgaaaaaatcgtggctcatttcgccacgaaccaaggtgaaacatttacagtgaacgtaatgtcattcgggttcaaatacgggcttccgatagatgccgacctcgtgtttgatgtaaggtttctgccgaatccgttctacattgaaagcatgaggccgcttacggggaaagatgaggaagtgtcatcctatgtgatgaagtggaacgaaacacaaaagtttattgaaaagcttgttgatctgctcggctttatgcttccgtcttataagcgggaaggtaaaagccagcttgtcatcgcgatcggctgtacgggcggccagcaccgctccgtcacgctcgctgaatatttggctgactattttaaaaaagatttctatactcatgtcactcaccgggacattgaaaagagaagccggaaatgaataagaagccgaaaatcgcaatcttcggcggcggaacgggtctgtccgtgctgcttcgggggttaaagcataagcccgttgatattacggcgattgtgacagttgctgatgacggcggaagttcaggccgtctgcgggatgaacttcaaattccgccgccgggtgacatccgtaacgtactggctgctttgtcagatgttgagccgctcgttgaaaatctgtttcagcaccgtttcaacaaaggaagcgacttaaccggacattcgctcggcaatttgattttggcagcgatgacaaatataaccggtgatttctttcacgctgtcaccgaaatgagcaaggtgctgaatgtccgcggcagagtgctgccggctgccaacaccagtgtcgttcttcacgctgaaatggaggacgggcaggtcgtctccggagaatcgacaatcccttcttacggccagcggattaaacgggtgtttcttacgcctgaaaaaattgatccgctcccggaaacgattgacgtcatccgtcaggccgatttaatcattatcggtccgggaagcctgtacacaagcattcttccgaatctgctcgtaccgaaaatcggagaggaagtcgtcaaggctgcggccaaaaaagtatatatatgcaacgtcatgacgcagcccggagagacgctgcaatacagtgcggccgaccatgtcaaggcgctgaacgatcatatggagcagccgtttatcgacacgatcttaatcaacaatgaggagatccctgacgaaatcaaaagcaaatatgcgaaagagctggcccggcccgtcgacttcaatgttgaaaagctgaaatccatggggcttgaggtcatcagggatcagattatcacgtataaaaatggcgtaatccgtcacgatacacataaagtggcttctcttcttgtcgatttattaagggactagaggccttttgaaatgaggtggctaatatgtcatttgcatcggaaacaaaaaaagaactgacgaacctggaagtgaaggactgctgcgccaaggcggagctgtccgcgctgattcggatgaacggttcactgtcattttcaaaccgccatctcgtgcttgacgttcaaaccgaaaatgcggcgattgcccgccgcatttatacattgctgaagaaacaatatgatgtatcggtcgaactgttagtcagaaaaaaaatgcggctgaaaaaaaacaatgtttatattgtgcgcttttctgaaaatgcaaagctgattttagaggaattgaaaatcctcggagagaactttgtatttgaacggaatatttctgaggaactggtggcgaaacgctgctgcaaacgttcttatatgagaggggcgtttttggcggggggatctgtgaataatcccgaaacatcgtcgtaccacttggaaatcttctcgctttataaggaacataacgattcattatgcgcgctgctgaatgaatttcatctgaacagcaaaacgcttgaacggaaaaaaggctatattacgtatttaaaagaggcggaaaaaatcactgaatttctgaatgtcatcggcgctcacaattcactgctgcgttttgaagatgtgcggattgtcagagacatgagaaactcagtgaaccgcctcgtcaattgtgaaacagcaaacttaaacaaaaccatcggggcttcgctcagacaggtggaaaatattaaatacattgatgaacggatcggtcttgaagcgctgccggaaaagcttcgcgaaattgcgcagctgcggattgattatcaggaggtcacgctgaaagaactgggggaaatggttgcaagcgggaaaatcagcaaatccggcatcaatcacaggctgagaaagctcgatgaaatcgcagaacagctgcgtacaggacaaagcatcactttgaaataaccgtacagaaaaggggagatcttatggttcaggggaaagtggaagtgcgtttaaagacgggattgcaggcgcgtcccgctgcattgtttgtacaggaggcaaatcgttttgcatcagatgtgtttcttgagaaaaacggcaagaaagtgaatgccaaaagcattatgggattaatgagtctggcggtcagcacggggacggaagtcactctgatcgctgaaggcgacgatgaaaaggaagcgctggaaaagttgtccgcttatgtgcaggaagaagtgtaaacactttgtaagggggacggaacgatgaatgagtttctgaaagattgttatcaaacgataggctgggaaaaggattccctcgatttcagcaacctgccggagtttttaaaggcgctcgcatatcggtttccgtttgaaaatcgcgcggttttgtccaaaaaagaatatgacgtcacgaaagaaggactgtggcggcacatggtgaaggaacctcatggcggcctttgttatgacttgaacggactgctttatttcatcctgaaagatgccggatttgatgtcaaattgatccgcggaacggtctggaaaaacggctgggcgctgcccggcacacatgcggccgtacttctttccgccggggggaatgagtacatcgctgatgcaggcttcggcctcaatctcgccatgcagcctgtgccgatgtcgggagacgagacggtatcagcggccggagcgttccgcgtgaggatagaagagacggaattcgggacatacctgcttgaaatgaacaaaggggacggctggcagacaggttacgcattttcgcttgaagaaatcgatgaaaaggacctcaagtctatgaaacaaacaatctttgaacatgaacgctctcctttcaacaaacgcctgcttgcttctaagcggacaccggaagggcacatggttctgtctgaacgcaatataacaataaaaaaacacgatggcacggcggagaacagcagaatagaccgatcagagtttgaagaaaaatttactgctcattttatatgaagctcgcaggttctctgcaaaaaaaacggcctccgcagggaagccgttttttgtatgtgtttatctcatttttgtaaaggttttataatgatctgtcgtcttataaatcagccagtcgcttgagtaaagaatccggtctgaatttctgaagcctgatgtatagttaatatccgcttcacgccacgtccgtccgcttttggcagggagtttgccttccctgtttgagaagatgtctccgccgatgcttttccccggagcgacgtctgcaagattcccctttgatgcaacccagccgagggcctgcgcttctgactttgtaatgtaattatcaggaagcttatgataggtctgaagataatccgcaaccccgtcaaacgtgttgataacctgtgcttcagtgtgcgccttgtgagaagatgtatccgtcttggcagccgtggaaaacagcatccccgccgcggagaacagcaccagcaaacaaacggaaatccacgataatcgttttttcaaagcaatacctcccatttttatcatgtgaagctgattccttttcattgtatcagcatcgagagaaaggaatagaaagaatttaaaaatagttcttttgatctagcaaaaaataaaccccggctgaaacggccgggatttttcatctcattgaaattccttcgtgaggtttttcggcgtttttccgtatacggcgtcaatcatgttttgtgcggcttgcttgaacatattcaaacggatttttgccgttgctgacccgatatgcggaagcaatgtgacgttttccagctgcaggagcggattgtcttcggcgatcggctctttttcaaacacatctaaaccggcgccttttatccagccctcctgcaatgcgcggatgagcgctttctcatcaaccgtctttccccgggaaatattgacgaaacatgccgtatctttcatcaatttaaattcccgctctcccatcatatgatacgtttcgtcagtaagcggcgtaattaacagcacaaagtctgatgttttcagcagtgtatctaagtcggcatatgtaaccccgagttccttctcagcgtccggttttctgctgcgattataatacagcacgtccatatcgaagccgaattttgcccgtttggcagcttgttcaccgattctgcccatgccgataattcctaatgtctgatggtggacatccataccgaaaagagattcttcctcaacggttccccatttgccggcgcggacgaatcgatccaattcggcaacccgtctggcggaagacaggattaatgaaaaagccagatcagcgacagtgtcatctaaggtgtacggcgtatgcgtgccgacaaccccgcgtcttttcatttcttcaatattaaaattatcatagccgacagaattattgctgacgaccttcagcttcggcgcgtgatccagtaaatcactgtcaatcgccgttccggatgtcagcagcccttcagcatctttcattttttcgtacagttcttcttttggaatggtatcttctttccagatgtcataccggcaatgctcgcctatcatttgttcgacttccggcggtatcgatttcgcgatgaatacatagggtttcaacgggcttctcctcctttgtctttcttctctattttattatataagagaagcggtaacgtgagaaatattcaaacgcatcacgataaatttctggttcttttgaacttaaaatgaaagaaaaagaaatgtacatgcttggtttctccaaacaataacagaatccgcctatatttctgaaggcaaaatgagcggaaccgctgttttcaaaagctttataggttggtgtaaagataaattttattatttttgaaagatataaatgaacataatctgaatttacagtcaaattatcgtgtctttttttgaaagcgcttttgaggcctttttctgtgctataattccttactgtaagctgggtaagaaggcttgcaatacaatcggatgggagatgaatagaaaaatggtttctttatcaagcattttggagcacaaccagcagtttgtccaagaaaggaaatatgaaccttaccaaacgacaaaattcccgaaaaaaaagcttgtcatcgtatcctgcatggatacaaggctgacggagcttctgccgcaggcgatgggactcagaaacggcgatgccaaaatcataaaaaacgcgggagccattgtttctcacccatttggaagtgtcatgcggagcattttggttgccgtttatgaactgcaggcagaggaagtctgcatcataggtcaccgcgagtgcggaatgtcgggattaaatgcggcttccatattaaataaagcaaaagagcgcggcgtggaagacaaatgtctcagccttctgcagcatgcgggagtcgatttggaaacatggctgaccggctttcacagcgtcgaagaaagcgtggcccacagcgtgaatatggtcaggcatcatccgctcttgcctgaagaagtgccggtgcacgggctggtgattgatccggggacggggacgttggatgttgtcgttgacggttatgaaacagtcaaaggaggatgcagctgacgatgcaatttaccggcagatatcagggatacaatttgcagaaatttcagaaagacctagtcgcgggaattgtggtcggaattgtagcgattccactgggaatggcctttgccatcgcctcgggggtcggtccggaatacgggctttacaccgttattgtggccggaattctgatttcgctgttgggcggctctaaatatcagatcggcgggcctacgggggcgtttgttcccattttgtttgccattgtgatgcagtatggttttgagaatttactcgtagccggttttatggcaggcgtcatgctcgtcctgtttggcgtatttaagctcggaaagattatgaaattcgtgccgaagccggtgatcgtcggatttacggccggaatcgcggtgctgattttctcggagcagattgcccattttctcggtctgcgcgatatccaaaagcatgaaagctttatcctcaacattgcggaaataggcaagaagatcggaacccttaatttatacagcatcctcatcgcgggaattgctttggccattttgctgttatcagccaggctgatgccgaagattccgggcgcgcttgtggcgctgcttgtctctacagccgcggcggtcgtgttttttcctgacaaaatggcgacaatcggttctgcttacggggaaatcccgcggcagcttccggctttccagcttcctgatttctcaatcgataacatgatcatgatgtttccgtcggctctgatcattgcgcttctcggcggacttgagtccatattatcggcgatggtcgcggacaatatgaaaggatcaaggcatgacagcaatagggagcttgtcgggcagggcatcgccaatatggcagcgccgcttttcggcggtataccggcaacgggagcgattgcgcggaccgcaacaaatattaaaaacggcgcagtttctccgatttccggtgttgtccacggagtcaccgtcctcctcgtcctgctcgtcttcgccccgcttgccgttcacgtaccgctggcaagcatggcgccggtattgatggttgtggcttggaacatgagtgagcggagggaagtcgccaatatgatgcggctgaaaaacactgattcattcgtactggcggcaacctttttgctgacggttctgtttgatttaatcatcggcgtttctgccggtctcgtgctcgcttttgttttctttatcagaaaaatgagcgaatcaacacgtatcaaaacaccgcatgccgctgtcaaatcggttaaaaatgattcgtccgtcagcacatattccattgaagggccgctgtttttcggttcaattgattcactggaaacatcgctgctggagaggcttcaggaaaagccgaagacgcttattctgctgatgaataatgtacattacatggatacctccgcagaagcggtgctggggaatgtgatgaaccggatcaaacggcataacgggagattgatgatcgtcggattgcaatcacagccgagagagctgatccggaagacggggctgtttcataaaatcgggaaacagcatttctttgagcatcaggacgagataacgggataaattcagatacggcctgtccatgaaaaagcggacaggccgtgtttttattcggtttcaaagcgcttgatcagtttttcctgatgggctttcatcgcatcttctaacgtgattccgtacttatcagcaaggatggccagatttccgaggacgtcacccatttcttcaatcagctcctgcctgcgttcagcctgggtcgcgtctttttcatccggccggtctctgccgatttcatatgctcttaccgcccgggcgagctcacccgcctcttccattaaaaaaccgattctgataaatggcccgtacgccgtccatcctcgtttttcataaaaatctttcgtccattgttctgcttcagccatctgcatgtgaaacactccttatgtcctgtatgattcttattgatattatcatatagagatgggacaatatatagtgtattttgatttattgatgtacatatatagatatggagatgaaaaaatgaaaaccatttgtgtatttgcggggtcaaacccgggggtaaatgaagagtacaaacgcaaagcggccgaactgggtgaatatatggcggagcagggaatcggccttgtttacggcggttcacgggtcggtctgatgggaaccgtcgccgacgcgttaatggcaggcggcggaaaagctgtcggcgtcatgccgagcggactgttcagcggagaggttgttcatcagaatctgacggagctgattgaagtcagcggcatgcatgagcggaaagcgaaaatgagtgaacttgccgatgggtacattgccatgcccggcggcttcggaacatatgaagagttatttgaagtgctatgctgggcgcaaatcggcattcatcaaaaaccgatcggactgtacaatgtgaacgggtattttgagccgatgatgaaaatggtcaagtacagcattcaggaaggattttcgaatgagtctcatttgaagctgatacacagttcctcccggccggatgagctgattgagcagatgaatcggtatacatacccgattttagataagaaatggcgggaattgtaagaaagaggtctgaaatatgtttcggcggttgcatctaaccattctgatggaaaattctccgcctatagaataccttttctttctggaaatcgttttctctttctcatgcgtatcacacctttctttatgataagacatatgtatgagaataagatgagaaagagaatgctgttggggttgaaagcagaacatccatttcctcagaggagatggatgttttgcggtttgcagactgtatgcgtttacaacttttgttgcacgaatgtttcctccgatatgaaatcatcctgctgcatcttttgtttttttgaactgattccaaatataccgactgtcagtgcacaaagaaaccagcagcctgtaaagaacaagaaaacacttaaaaatccgtagcctgaatacaggaaactgacgacaaaggggccggctacatttgcaagacgtcctacgccgtaagtgaggccatttccagatgccctggcttcaaccggatataattccggcgtataggcatatgcgatcgaactgaaagtacgctcaaacatatgcatgagaaatccgcatatgacaatgaccatcggcaaaggattgatgccataaaagaatccaagcgccataataattaacgataaaacagaaatggcccactttcgatccacacggtcagagatttgcgacgcaatgagagcgcccagcggggcaccgatcgttcccagagtgacgtatacgatagactcatccattgatacgccttcttttaccaaaagggtgggaacccacgtgccaaagccttgaattgcaatcgtggaagctgcccacatcgtcattaaaacaaaagttcttcctgccaaaggcttttgaaataacgtccgatatggaacggattttacagcggtttgtctgcttcgcagagccggagctggttcaggcagttcacccttttctttttctgcttttgcctccagttcaagcagaatgcggtgtgcttgttcgctttttcctttcgtgtccagccatttcggtgattcttccagttttctggcgatcagcggaaaaaaaataccgaccgcgccgaatagaaagataaaccgccagccgtaagaggcggacggcacgaccaatttagccacccagccggctgcaggaattccgcatatgccgattgtaatacagattgcctggtatttacccttagttgcggatgggaaaaattcgctgatatacgtacttgccacaatcgttgtggcgccgatacctaaactcgtaagaaatctaaaaacaccgagtatttctgggttccaagccagagaagagaggagggagaagaaagagaaaaaggttacaaccagaattaaaccttttttccttccgaaccggtctgaaaaccatcctccggcagaggcgccgataaacattccgaaataggagacagacgtaataaaagcgatggtatgagtagaaatgttccattcctttaaaagtgaaggcgccgcatatgaaaacgtatttaaatcgataaaatcaaaaaagtaagcgaatgaaaggataacgagcactgcttgatgggcccttgaaaaaggcagtctgtttaatcgattagacgcatttacattgatcatctcgtattcctccgtttatctttgacttgtctgaagactggtattaaccaatgtgattcagcgtattcaggttgtaactttgctttgtaaacacatagccttcagagatttttcttgctgtgcgtactactttaatcgttgttccatccggatcaacatctgcctcggtttctaaaatgccgcttggatgtcccaatcgaatcgttctgccatagaatgaaaattcagataatattgtatcctgcaatagcataccggcagtcgtacaaaccgcccctgtaatggctaaagcttgatgcggtttttgcatggacatcatacgaatgacaagatccatctcttctgcgtgtctctttatcccttttgtatcgatataatccgctggagatgagattaatgttagttttggtacggccggtgattttgcagcagcctcatgtctcggagcgaatctgcatttctcggctgcaatcgatcggatcatttcgagcttttccaatatatccggagtatattcatccggaagttctaagccggtaagccccgtgtcctctgcttttacaaagacaagcggattagcgtaatcaataatcgagaccgagatatttccatacggtgtatcgagaacatcaataggctgaccagtgggaaacagcttaccggtcaccgctccttcagcctggtgaaatgaaagataaataggagaagctgtacctggaaccccggggatagagcagtccccctggtaatgaaatgttccatttctgacttcaacttctgctacgatcactttttgagtgtttgtatttaacattctgacttttgtaaccggctcttcagcttgaacgagccctttctcaatagcataagggcctacggcagcagagatatttccgcaattgcctttgaagtcggtaaaatggtcagtcaaactgacctgagcaaacgtatactcaacatctgcatcctttctggcggatttcttaataatggctgccttgcttgtgagagaatggccgccgccgagaccgtcaatttgtctctcgtcagggctccccataatgtctaaaagaaaatcgctccataggtttgtatcgtctggcatgtctttttgatgaataaaaacgcctttgctggtgccgcctctcatgacggttacaggaactttttccatgctgtctcatccttacatcattttgtgtggataaaaaggtaccggtccctttggaaaatatcgtatgataaattaggattataagtaaaacatataatttttataaagttgaataaaaaacttttataataggaggaaattttatagcagaaaaatattttgggggatttcatatggatgaaaaggattggattgtgctcattacattattcgaagaaaaaaatatgacgaaggcggcagagcgattatatatgacacagccggcgttaagttatcggctcaaaaacctggaagcacaattcggagtgcgccttttttataaaagaaaaaaagggatggagttcacttcagaaggtgaacatctggttgattattcgaaagagatgctgcaggaattcagaagagtgaaggatgatatgctcaatatgagccatgaagtcagcggggttctcagattaggagtctcaagcaattttgctcagtataagctcccggcgattctaaaacggttttctgatcagtatccgtctgttcaattccacgtcaatacgggatggagtgcgaaggtgatggatttgcttcatcattcgggggtacaccttgggattatgaggggaaattatgattggcaaggggaaaaacaactgctaaatgaagagcggctgtaccttatttcaaaaactgaaatcaacagtgaggaccttcccaaattgccgatgatttattatcaaactgatgcttctttgaaaagtttgattcaaaaatggtggaataaccaatttactgaaccgcctttcattgcgatggaggtagacaggcaggaaacctgtaaagagatggtgaaaaacggtctcggttattctgttgtgccggaaatctgtcttcagccttctgatgaattatacacattggcgctatcctataaaaataacgagcctgtgatacgcgatacttggcttatgtataattcttcagcgttagaattatctgtcgtcaaagcattcattacttttttgaatgggaataaagcataaaaaaacctgcaagagacatcagctcttgcaggtttttttggcattacttctggtcttctgtattgcgtgtcagcactttatcgattaagccgtattctaaggcttcatcagctgatttgaagttgtcgcggtctgtatcgcgctcaatgacttcaagcggctggccggtacgttcagcaagcactttgtttaatttgtcgcgaagcaagagaatgcgttttgccgcgatttcaatttctgtcgcctgtccttgcgctccgccaagcggctggtgaatcataacttcactgttaggaagcgcgtaacgtttgcctttttctccggctgcaagtaaaaatgctcccatagaagcggccataccgatgcagatcgtggatactttcggtttaatgaactgcattgtatcatagattgccataccggcagtgattgatccgccagggctgttaatgtaaatggaaatatctttttcagggtcttccgcttcaaggaataaaagctgtgacacgatggagttcgcaacgttgtcatcaatcgcagatccaagcatgataatacggtccttcaaaagacgggagtaaatgtcataagctctttctccgcggttcgtttgttcaatgactgtaggtattaaattcataatgctcctccttcaccttttaggtaagtatgtatttacatgatacatttttggtcaataaaggtcaaacaaaacgctgaccaaaatgccaaccttttcttctaacaccatttttcccataaaacaaaaagttcaaacagcaaagtggaaatgaggatgatcagcgccggagccttgagaaaatgatatggccggagcgctcaaaatagaccgcaatcgcgtcgctacgtacggctgaagggtctgactacgttgtccgcccttccaaaagccgtaccggcaaatacgtttccagcggcaaatcatcaaattcgccttcaatttcttttgctaaaatctcgatggctgttttggaaatcaattcaatcggctgctggatggttgccaagtccggcagaaccgattgaacggtttcagtgccgtcataaccgatcacttttaattgattcgggatgtctattccccgttttttggcctcggtcatcactgcagccgccatgatatcatcgctggcaaaaattccgtcggtgtcgggctgttcatcgaataatgttgaaataatgtcatggtaatgctgataaaagggtacttcatatgtaataggcttccgtccgtgttcatgcatgacgtcttcgtatgcttttcttctgaggtttgccggtgtttcgagttcaatcgggccgttgatatggacgatgtgccggcaccctttttcaatcagcagttctgccgccttttttccgccgtcatagttgtctgagccgacgacgggaatcgtgtccgataagtaatgatcaatggcgacaatcggcagattttgcttgtgataattgagaattccccggttgtaagtcacggcgatcacgccgtccacttggtttcttatcagcatctccaaatatttttcttccttatcctttcgatgtaaactgttgcaaagcagcagtttgtagcccatggacgtacaaatgctttcaatatgaaaggcgagttcgccgaaaaacggattgctggagtttgggatgataagccctattaaattggttcgttttcggaataaagagcgggccagatcgtttggaaagtaattgatttcttccatcgccttgtacactttttcttttgttttttcgctgatatagccgcggttatttaatacccgcgaaacggttgtagatgaaactcccgctattttcgcaacatcatgaatgttaggcttcattcccgtgccctcctgcttactgaaatggcttacaatttccgtcacgcacttattttagagaatcaggctgacatgtgcaaggacattccgtgtttctgttttcatataaagagggtgcgttttgtttgattaaaataatcagaaaattgtatgtcaaccgattgacatatggaaccggttgacatacaattctttttgaaagcgctttattctcagagtgaagggaagtgacgggtatggagagatggctggcggcaataaagtgaaagaatcgagcagcgatggaaagtaagcgcttactcagagatcgcatgtatatgatgaaaatgaagaaggaagtatgcggctctaaaacggctattaaaaggtcctattaaaggagcggtgcaaatgaaaagctcaaaaagtctgtattggaaactgagtgcttatttcttctttttcttttttacttggtcttccagctattctttatttgcgatttggttagggcaggaaatcaatttaaacggatcagcgacaggcattatcttttctgtaaacgccgtatttggcctctgcatgcagcctctttacggttttatctctgacaaattggggctgaagaaaaagatattgtttatgatcagctgtcttctcatattcacgggtccgttttatatcttcgtctatgggccgcttttacaatacaacgtctttcttggcgccgttgtcggaggcttatatttgggagccgcttttttggcggggataggcgcgattgaaacgtacattgaaaaggtcagccgaaaatatgatttcgagtatggtaaatcaagaatgtggggctcgctgggctgggcggcggctgcattttttgcagggcagcttttcaatatcaatcccaatatcaacttctggatcgcgtctgtttcagccgtcatattaacggccattatcatgtctgtgaaaatagaaatgactgatcatgagaaaaacagagcggattcggtccggttaaaagacgtggggcggctctttttactaagagatttctggttttttatgctgtacattatcggggtgacttgcatttacggcgtatatgatcagcagttcccgatctactatgcgtctttgtttccttcagtgtcgacgggtaaccaagtattcggctatctgaattcattccaggtgtttttggaggccggcatgatgtttcttgcgccttttatcgtcaataagttcggggcgaaaaacagtttgattttagcggggtttttaatggctttccgcatcgtcgggtccggaattgcagttgagcctgtaggcatttcatcaatgaaactcatccacgcactggaattgccgattatgctgatcgccgtttttaaatatttggctgccaattttgatacgcgtctgtcgtccgtcctttatctcatcggttttcaattcgcatctcaggcaggcgcgtcgattctgtcgccgcttgcgggaggattatatgacagtgcggggttccgtcaaacctatctcatcatgggaatcgtcgtcttcggttttaccgtcatctccatatttactttattgggcccgaaacaaaacagcaggcgtgtccagcgtctgcaaaaaatcggatagagaggatgttacaaatggatagaattcagcaggcggaagaagctctgaaggaagccgagggtaaagtgaaacaaagatatcgattggggtaccatattatgccccgggcgaattggatcaatgatccgaacgggcttattcagtttaaaggagaataccacgtcttttttcagcatcatccgtatgatgagcattgggggccgatgcattggggacatgtaaaaagtaaagatctcattcattgggagcacctgccggttgccttagctccgggcgatgcattcgaccaaagcggctgtttttcgggaagcgcggtcgatgatcatggaagattagccctcatctatacaggacataatataattgatcaaaagaaagacctattctatcaaactcaaaatatcgctgtcagccaagatggaatcgtgtttgaaaagcttcaggaaaaccctgttattgcggaaccgccggaagacagcgcccgtcatttccgcgatccgaaagtatggaagcatcgcgatgtttggtatatggtcatcggcaactcttcaaaagaaaacgtcggacgggtcgttttataccgttcacctgatttgagtgattgggaatacgcgggggttctcgcccaaagtgacggtaatctcggctatatgtgggaatgtcctgatttctttgaattaggcggcaagcatgtcctgctgatttcaccccaggggatcgaggcggacggtgattcatatcaaaatttacatcaaaccggttatttaatcggtgactatcataatgaaacaaacaaatttacacacggtgcttttaaagaactggatcacggccatgacttttacgccgtgcaaacattattagatgataaaggacgcagaattgctatcgggtggatggatatgtgggaatctgagatgccgacaaaagcggacggatggtgcggtgcattgactttgccgcgagaactgactttgcgtgatgatcataaacttttgatgaatcccgtggaagaaaccaagcagctgcggaaaatggaataccgggaatgtgccggacgatcgctttcagggagttacttggcaaagacgtccgaagacctgcttgaagtccgggccgtgtttgatgtgaacgattctgatgccgaaacggcaggttttaagattcgcggccttgatgaagaagaacttgtgctgacatacaatctaacggataaaaagctgacgcttgattgcaccaagatggggaaagcgaaagacggtgtgagaagggtgcagacggatacaaacggcaagctggcgctgcgtatctttattgacagatcctcgattgaagtattcgccaatcatggagaaacaacgatgacaagccgtatctatccgaatgaaggcagattggggattgagctgttttctgagaaaggcgccgtaaaggttgaggaattcacctattggacgttaaaggacatttggaaaaaaagctaaaacgggtgattactgctttttctgcagtgattgaaaatgaaccgagccgggggcagtccgcctgaaatgggttttttgtgaaaatcaatgccggtaaacgatgcaggattatgctgcatgaggacgctgcataatcctgttgtgcattatcaaaaaagagttgctttctgcgcgttcctttattataatataaaggtatctgattgaaaaaacgtgcgctcgtagctcagttggatagagcggtggtttccggtaccacgtctgtcgggggttcgaatccctccgagcgcgtctcagttaagaggataggaaaaacctcgcagatgataaatctgcgaggttttttattttatcttgttttgaaactgttaacgaatgtgtctctgttatgttcggttccggcaatcagccgcgcactttcactgatccgctgcgcgagagctttttgcgccttgccttcaaagctgttcaatagtgctgaatacacttcatataattcatctttcaacgtatccatttcgaatgtcggtttcagcgttcggcggactgtttcaagttttgtccccgctgcctgcgtcatccctgttttcagcatctgccgctgcagcattttcttcatcgggtcgtccttgtgttctaaaagttcgtctaatgtcggcattatgtatacacctctatcatcttaaccagtttgcgagcatctggtcttttttctgaaattcgtctgctattttatgtaagaatccgccgatctcttctaggtccgtgatcgccgcctgcaaagaatcaataaacgcctgctcagcctgagtgtcgtaaaaaatcgggcctttatcgtaggattgcgcaatatcttcaatggtattggtcacgtcctgtgcttgaagctgatcaaacaagccgtgtccgacttggccgtaaatttccgtttttagctcggcgattttttcatcgtgctcctgataggcgttctgcgcttcttttttcatcgtccgtaaatcctcagtcatggcctgcaccttttcagccagcttctttgcgtttttcggcgttacttttattgtatctgcgcttccgatcgcaccggccggcagaagagcgccgaggtttttgtcaaagactaattcatctccgttcggatttgtgatgcttccgtttcggtcaaatatgaaattcgcttcatttaagccgtgtgtatccggatttctcagaatgacggtagtgaagaaataagcgagattcttgccgatctgctcgttcaagttcccgccaagccgctgctttcggctgaactgtgagagcgaagggtttttcgtataaatcgttgtcccgttgtggcggtcatattcgttccaataacccgccccggccatgtcgtccggattgataattgaccggatgtatggatcgtatatgccgctgttgatttctttctgtgtttcttcatcgtgcagttttacgacggaagggctgttaaacgcgacggcgtacacatcattattcactgcgctgtattcggcctcagcgccgccgagtgaatggccggttgttgaaataatcgttgacgttccggcatactttttctttacgctgcgtaccagctgatcggcttgatcgatttgcgaagttttcgtcatcagcttatactttccggttgtgagcatggcgtcttgagagggcgttccgtgataggctccgagcgttttcgaggtatcctttgcgtctttttttacaatataatgtacttcttttttcggatcatttccgaaaacaatattgccgccgtccgcttttacgccgtcattgatcgggtcttttccgatatcggttcccgcaaaggcgacgaccacgttttcggggttttttgattttgtccattttccgttattcttcactgcttgtgctaatacaaccgcatcaagtcctgtattatcgtctgattttatttgatcgacgcaccagtaagtaggttttgaaatggaagaattaaagcgtatataatcgttcttctctaatttccttttaagatagtcatagttataagcacgttgactcatcctgtaatatgtttcatctgtcaggtttgaagtcctgattttcttgctcaagatatacagcacctttcttgtcatgtaaaatagggtagggaaagggatgattttttttgaaaaaataccttattattgttctagtgttaattataaccgttggagggttgattatgaagcatcaatatgatgggaaaaaggaagaaaatgctcttttcgaaaaagccaaaagtaaaatgaccgagtacttgcgtagtgagtataaggatatagagaaaatttcttatgatgattattttattgatccaaccggcggaattacagttgaggggtacctaaacggcgataaaactaaagaatttgacggcttatatgatcctgtaggagacaaaatagggagctcctctgtggatgcggaagaaaaatcttaagacgcctaaatgcacctgtcaccgaccattttttccagtccgcgagcttcatcatcactcatggaacggatgtttctgtgaaaaatatattattatgttcattatcttaatagcagccggaagttttataatgaagaatagtaatgataaaaatgctcaggctgaagagataaagattgctcaagaacgaatggagaaatttatcaaatcgaattatgaaggcatacataacgttacatttaaagataaatacgaaatagatccaatgggcgggatagaggtatttggctattacaacggtgatacatcgaataaattcgatggtatttacgataaggcaaatgacaagatcatggggcactcaatagacgctgtaagaaagaatgcagagataaagattgcgattactaagaagacgctcgtctggcgttttttgatatatgagtatacagcaaatgaaaaagacaagggtttcggcatgtgccgcccttgtctttttttattgaacactgaaaaacataaccggaacagctcattatttgacagtccattttaacagcgttacaattaaacatgtaaatagttacatgtttaaataaacataatatctcgggaggtgatacgtccttgaatgaaccttctttaaaaaagtcatttatgagtcagtgaaccgcatcattgatcccgagcacgtgtatttccgcactgtgcctgtgtttgaaacaagcagcgaggcatatcagcatctgcaggaccggctgtttatcggggctgcggtcagattgccggatgacattcggttagatatttatgaagttcaataataagatggagagtgagtcaacatggaaaactttatcggaagccatatgatttacacgtatgaaaacggctgggagtatgaaatctatattaaaaatgatcataccatcgactatcggattcatagcggaatggtgggcggccgctgggtgcgcgaccaggaagtgaatatcgtcaaactgacagaaggcgtatacaaagtgtcatggactgaaccgacaggcacagacgtttccttaaactttatgccgaatgaaaaacggatgcacggaattattttcttcccgaaatgggtgcatgagcatccggaaatcacggtgtgctaccaaaatgattacattgacgtgatgaaagagtcacgtgagaaatatgaaacgtatccgaaatatgtcgttcccgagtttgcggatattacgtatctcaacaatgcgggaatcaataacgaagcactgatttcagaagcgccgtacgaaggaatgaccgatgatatccgtgcgggaaaattaaaataagagaaaaaacccggcagcttggccgggttttttgtatccttttacgacagggttttggtcatgataaagtcgacttgcttatcatcccccatataaaaagagtgttctccagtttggacaaaccccattttttgataaaaggcgattgcattttcgtttttttcccatacgcccagccagattttctttttattgtgtgctgttgcgattttcacagcttcattcagcagatatttgccaagcccgtgtttctggtggttttttcttatataaattctctcaatctcaagagaatcttcacccattttttctgattgtgcttcgttcatgttgacttttacataccccgcaaggtcatcatgataataaacaaaatagaatttagaagacagattggataattcctttttcagctgttcagagcggaatgcattttccaaataagctttcatattttctggtgaattttgatccttaaatgtatcattgaatgtttcaatgcttatctcccggagctctgttatatcgttaaggctgcacttttttaattgaatactcatggtcatacagctcctttcttcatttatcatatcagctgattttttgttgtatttgcaatgaaaataccgtatagtaaacataccgtaattttgttgtatttgcaacataaaataagaaaatgaggacgataaagtgaaatatgttttttatgttttaggaatcatgatcttgacctttggtatttctgtcacgattcaatcagatcttggaacgtctccttttgatgcgcttattgtgggattatccgtccatgcagggcttaccgtgggaagctgggaaatcatcatcgctttcctgttaatttgctgtaattcaatgttaaaaagacaaagaccggaatttacagggatgattacggcgtttataacgggaatcgggattgatatgtggctttttttcctgcaccgaatcataacgcctgaaccatggtacggaaaggcgggctgttttgcaatcggtttagttgtgatagggataggaaccgcaacctatctgcacacaaatttcgccccgatcccggttgatcggttaacgttaattgtccgcgaattaaccgggagaagcatctttttttcaagaacggtcatttacttcatatttttcatactggccgtgatgctaaaaggtccggtaggcatcggaacgttattaacagtttgtttaggaggggtcattctccatttctttatgccgattaccggaagatggatagacggcatattaacagcatctccaaagcaggaagaaacgaaaacccggtagcgggggtttttacccgattctatcatttttcatttcatccgcatgttcaaggtataataaaaaagggggagggatttttatgagcggtcaaagaaagctcgttttttacggagctgtcagcgcagatggctatcttgcgcgggaaaatcactctttagattggttaatcggaactgaaggtgaagacggcaccgattatgaagctttctatgaatctgtcgatacgatcatcatgggcagaaaaacatacgaggacatattggttttattgcctgaggaatttccgtacaaaggtaaagaatgctatgtgttttcgcggacattgaccgggcgtactgaacatgtgcggtttgttcatgaagagcctgccgattttataaaagcattgaaacgccaagaaggcaagcggatttggattgtcggcgggagtgatctgctgcacccggttttggaggaaaaacttgtcgatgagtttatcattcagatcgcccccgttctgctcggacgcggaatttctttgttcaaacccggagaccgggagacaggactgaagctgactgatgtcaggcgttacaaacaatttgcggagttgcattatgaagtgagataaaatgaagtgtatgaaagaaacccagtaaaggttaccgggtttctttttcatgtctgtttttatgttttgaaatggtgtgggccggcccgcatgaaaatcctgcaatcatgataacaacccctatccacctcacggcatagaaatcagtgtcgcgcaggaagataaatgaaactaaggtcataagcgccccgattataacggcagctgtgccgataatacttgatttctccatataaaaactcctttatgaatgtttggttaacttattgggttagaatataacatatcaggggtaatgcggaaatggattttctgcgatgtctgaagtaagatgaaaacgaaacgccaagggagccggctcccttggcgttttttatgcttgaaacaggatgcggcgttttgctgaatcgggatcactttcgacagcggtatccgtgttgaaaagcaaagttttgcgtgaatcggtatcatattcaggccaattgaagtgagaggtgttcgggtttccggtttttgcaaaagcgagccatgcggattggatttgtttggaaagctgttctgcgtcatcaccgagcggttcttgcagcgtctttctcaaagaatcaaagtttccgaacacaaatggcaattccagagcgtgaacggctttatgaaacggcggtgtttcgccatgccaatcaaagcggtacatccagaccggtgcgtgctgcgactgtccttgtgcgaaagcgacagccggccgccagaaaatcagatccgtcatcatatcgatttgtccctttaatgaatgcggatataaatctgccgcttgctcagtgcagttctctccgagatgataatgcaaataatcttgctgctttttctcggaatgaatgtctgtatcaggggtgaaaaacaaatatgcttcatcacgattggttccgatgatcataggtatgccttctgcggccccgtctgctatggctttcacgggttccgcaggcaatgtggccggatcgatggcgggctgaaacaaaagctgaaaaatgttttgatctagtgagcgccgcactttatccgcagtcttaagcaggtcattaacggaaagctcctgcaattgatcagtgccggcttcatgaataaatgccgccgcgatgtcttttgccatgtccgccgggatcgtatgagaggcgccgctttctaaaatggctttatgaaacaggccttttgcgtcaggcattgccataagggaggcgatgctcatgccgcctgccgattcgccaaatatcgtgacgttatccgggtctcctccaaattcggagatattgtccctcacccagcgcagggcggcgatctgatcgagcagcccgatattggcggaatacgcgtcgtgaatagaagacaaatgtaaaaagccgaacggtccgagcctgtaattgagtgtcactacaatgacatctccgtcagcggcaagggcagatccgtcgtaaagcggttcgcttccggcacctaaataaaatgccccgccgtgtatccataccatgacaggctttttttcgccctctgaatcgggggcgaaaacattgaggtaaaggcaatcttcagattgaggcggtacatctccggaaaacgatatagacagcatatcatccggctgcggacaaaccggtccgaacgaatcggcatgttttacgccgtcccaaggtgcgggcggctccggcgctttaaatctgagctctccgacgggcggcttcgcgtacggtatgcccttccatgtgcgggcaccgcggccggcagttcctttcattgcgccggagcgggtttgaacggtaagttttgtcatgatttcatccccttttttcttttcattataaacagagatgaagacatgaagcgaataaaagccttttcatcagcatatcattagtaacgcttccgttctaaaaatgatctgacttcctgaacggacaagccgagttctttggcttcctgcatcagcgctttccattcctcaatgttggattcagtcagttttctgttgcggtagggtgcgggctccgggcgtttttcagtcagtttgttcgtaaaggtgaacagttcttctttcggcatgcccgactgcacggcctgcacaaggtggatgcgccactcatcttccgtgcctcccatgtgatgcagcatcgtttcggcatcaaaaagctccgtcagatcgacctgcagggtggcggatacttttttcagaaattggatggacggatttgagtgaaccccccgttctatcttgcttaaataagatttagagacacctgcttcaactgctagctgattaatagagtagccttttcttctgcggtataaacgaattattcttccaatcattgtgctgaattctcccctgtatactggcatttttttgttcattataagaaatttttcgttctttataaaatttaaaattataaggtaagtgcagtaaataagaggaaaatcatgataatgttctttaaaaagaaccaaatggcttaatttgaaattttcaaatttcgaccttttcttttataatccaatcattaacagaagggggcgtttaagcctgatgcaataaggatgaggctgtaattacatgaatgagaatatgagttttaaagaattatttgacattattaaacacagacttttactgatttttatcatgacagcagttgtaacgctggtgacgggatacatccaattccgggtgatttcgcccgtttatcaggcatcgacccaagtgctcattcatgaaacaagcggtgaaaaaaattcgaatctcagcgacgttcagctgaatcttcattacaacaatacgtttcaaacgataatgaaaagcccggtagtgcttgagaaagtgaagcagacgctgcatctttctgagacggcatccgctttaaaagcaaagatcacgacaagcagcgaaaccgattcagagatcattaccgtagcggtgcaggacgagaacccgaaacaggccgccgctatagcgaacacgctgatgaagacatttaaaaaagaagtccgtgacaggatgaatataaaaggcgtcattgttttgtctgaggcaaaagcatcggaaagcccgatggtcaaaccttcgcgcatccgaaatatcatgatggcgttcggtgcggctctcatggcgggtgtgacgcttgcgttttttctccactttcttgatgaaaccgttaaaagcgagcggcagctcagcgaaaaaacagacttgcctgttttaggggttgtgtatgacatcaaaaatcagcagacacggtctgatgaaaaacatttcggggagtgaggcgtttgggattcagaaaaaagaaatcaagaaggggactggctcaaatatccgttttacatcacaaatcattggtggctgaacaataccgcaccattcggacaaatattgagttctcctctgttcagacccatttgcgctctattctcgtcacttcttccgttccgggagaaggaaaatcattcagcgccgccaaccttgccgcggtatttgcgcagcaggaaaaaaaggtgctgctcgtcgatgcggatttacgaaaaccgacgatacacgagacctatcagcttgaaaatgtacaaggccttacgaatgtgttagtcggaaacgcttccctcggcgaaacggtgcaaaaaacgctgattgataacctttacgtcttaacgagcgggccgacgccgccgaatccggctgagcttttatcttcaaaggcgatgggagagctgattcaggagatgtacagccggtacagtctggttattttcgattcacctccgcttttggctgtggcggacggacagattttagcgaaccagacagatggaagcgttctcgtcgtcttgagcggaaaaacgaaaatggataccgtccaaaaggcgagagatgcgctccagcagtcaaaggcaaagcttttgggggcgctgctgaataaaaagaaaatcaaaaaaacagagcactactcatattgagcggtgcaggtgatgtctccttacctttatcaacggaggcactcggctctgctgtgggcggcgttttccgctgccttagatgctggtcgtcggtggcggggtgtgaggacgggttaaatgcccaattttatcttaagatgatgcattgttatcggcttagctgttatgtctgtttttacgaaaaccgtatcagctaaaccgataaatgaggaggggaaagattgacttaccggagaagactttcaatgatttttgcattggatacgtatctcgttttactttccgttgttataggatatcaattttttgaggattcttatcacttttatgactccggagcgttgctgctgactgccgtgagcatgctgatcagccatcatgtatgcgcttttatgtttcaccagtataagcaggtatggacgtacacgggaataggcgagctgcttgatctgctgaaggggatcacgctgtccgcagctgtgacagccgccgtccaatacggggtgttccacacgattttgttccggctgttggccgtcagctggatggttcagctattgttcatcggaggaagccggatgatttcacgggtgctgaaagaaacgatcggcaggaagcaaaatgactcttccagggcgctgatcatcggcgcaggtgcgggggggacgctgctcgtccgtcagcttacccagaaaaacgatctcggaatcatgcctgtggcttttattgatgatgatcagacgaagcataagctcgaaatcatgggcctgcccgtcatcggcggaaaagaaagcattatgccggcggtgcagaggctgagaatccaccatattatcattgccattccgtctctttgcacccatgagcttcagacgttatacaaagaatgtgtgcagacgggcgcccatattaaaatcatgccgcaatttgatgagatcctgctcggaacgcaggctgccggacacatcagagatgtaaaagccgaagatctgctcggcagaaagccggtcacccttgatacgagcaaaatttctgacagcatcaagggaaaaacgattctggtcacgggcgccggcggctcaatcggttctgagatctgccgccagatcagcgcgtttcttccgcgggaaatcgtccttctcggccacggggagaacagcattcattccgtacataccgagctgtccgcacgcttcggcaaagaggtgctctttcacgcggagatcgccgatattcaggacagagataaaatctttgctttgatgaaaaaatacgagccgcacgtcgtctatcatgcggctgcccataaacatgtgccgttaatggaacataatccggaagaagccgttaaaaacaacattatcggcacgaaaaatgtcgccgaagccgccgacatgtgcggaacggaaaccttcgtgctgatttcttctgacaaagcggtcaatccggccaatgtcatgggcgcgacgaaacggtttgcggaaatggtcatcatgaacctcggaaaggtcagccgcaccaaattcgccgccgtccgtttcggaaatgtgctcggaagccgcggcagcgtcattccgattttcaaaaagcagattgaaaaaggcggacccgtcaccgtcacgcacccggcgatgacaagatattttatgacgattcccgaagcgtcaagactcgtcattcaggcgggggcgcttgcaaaagggcggcagattttcgttctggatatgggagaacccgtcaaaatcgtcgatctggccaaaaacctgattcatttatcaggctatacgacagaacagattcccatcgaattctccggcatccgcccgggagaaaagatgtatgaagaattgctgaatcataatgaagtacatacggagcagatttttccgaaaatccatatcgggaaagcggtggacgggaattgggccgtgctcatccgttttatggaggaattcagccgtctgcctgaagaagagctgagaaaaaggctgtttgaggcgatcgaatcagtacatgaagaagcggccgcaggcgtgtgatgggaggacagaaagatgacgaaaaaagtattattctgcgccactgtcgattatcattttaaagcctttcatcttccgtattttcaatggtttcaggatatgggctgggaggtgcacgtcgcggcaggcggcaatatgaatcttccgttcgttgatgaaaagttttccattccgatccggcgctcgccgtttcatcccgaaaatctttctgtttacaggcggctgaaacggctcattcaggacaacggctacgacatgattcactgtcatacgccggtcggcggcgtgcttgcacgccttgctgcgagacaagctcgccaaaaagggacaaaggtgctgtacaccgcgcacggctttcacttctgcgacggagcgcccctgaaaaactggcttctttattacccgatcgaaaaatttctttcttcttatacggattgtctgattacgattaatgaagaggattacgaacgggccaagcaaatgaaaaaaacagcttgcggcgcgaaaaaaatacacggcatcggggtgaatacagacaggtttcgccctgtgagccgggaagagagtgaacgtctgagagaaaaacacggcttcggcgccggggaatttattctcgtataccccgctgaattaaacggcaataaaaaccaaggacttctcattgagactgcggcactgctgaagaaccgcatcccggagctgaaactcgtatttgcaggagaaggcgtgatggaagcgccgtacagaaaaaaggctgaatcactcggtgtatccgacatggtgcggttttacggtttttgccgcgatattcatgaactgattcagcttgccgatctgtctgtcgcctcaagcatccgtgaaggactcggcatgaatctgcttgaaggaatggctgccgaaaagccggccgttgccgcggacaacagggggcaccgtgagatcatcgaagacggcgtgaacggttttctcgtgccggccggggacagcgcggcatttgccgatcggattgaaaagctgtaccgctccccgtgtctgcgaaaagcaatggggcaaaaagggcgcagcacggcggaatgtttttctgaaacacgtacggtaaaggaaatggcgcacatttacgccggttatatggataaaaaggagaaaagcgtatgaatgcaggagcacaaccgaaaatttccgtcatcatgggaatttataattgcgaagagactttagcggagagtattgaatccatcctgagccaatcttataagaattgggaactgattatgtgtgatgacgcgtcaactgacggaacgtatcagattgcgcgccgttacgcggatcattacggcgaccggatcacgctgattcaaaataagacaaatcaacggcttgccgcttcgctgaaccgctgtctgacatacgcaacgggggattatatcgccaggcaggacggtgatgacatctccaacccgaggagactggaaaaacaggccgctttcttaaacaagcacgcccactatcaagtcgtaggcacggggatgctcgtatttgacgaattcggtgtaaggggcgcccggcttttgccgcccgtgccgaaaccgggaattatggcgaaaggcacaccgttctgccacggcaccattatgatgcgggctgaagcgtacaaagcgcttggcggctaccggtcagtcaggcggacgcggcggatggaggatatcgatttgtggctgcgcttttttgaagcgggtttccgggggtacaatctccaagaaacgctgtataaagtaagagaggacagtgatgcgtttaaaaggagatcgtttacgtattccattgataacgcggtcctcgtttttcaggcatgcagacggttgaagctgccgctttcccattacgcgtatatcgcaaaacctctcatccgcgccattacgccgcccgcggtcatgaaccgttatcataaaaacagggacatccgccaaaaagaagggcttgccgaacatgactgacaaaccgatgcgggtgctgcacatcttcagcgggatgaacaggggcggcgcagaaacgatgatgatgaatttgtaccggaagatggacagaacgaaggtgcagtttgattttttaacccataggaacgatccgtgcgcttatgatgaggaaattctcgctctcggcggacggcttttttatgtgccgagcatcggcagcacaaacccgattacatttgtgaaacaggtcaagcgggtgattcaggaaaaaggcccgtttgccgccgtgcacgcccataccgattttcagtcgggattcatcgcgcttgccgctcgtttagccggcgtcccggtgcggatctgccattcgcatagtacgtcgtggcgggggcgggcgtcgcggcttgccgggatgcagctgtttgttttcagacggctgatcacggcaaacgccacggcactgtgcgcctgcggagaagacgcgggccgtttcttattcgggaaagaaaaagacgtgcatcttttgccgaacggcattgatctcgacttatttgccggcgggtgcgcggacacagaagctgaaaaaaggaagcggggcattgcaggcggccgtttggtgatcggccatatcggccgctttacagaagaaaaaaaccacgaatttctgctccggctggccgctgatatgaaagagcggggcatcggcttacagctgattctcgccggagacggtccgcttcgcaccgacatggaaaatctggcggcgaagctggggcttgatgatgatgtgcgttttatcggcatagaagaccgcgttcatgccctgctgaaaacgttggatgtatttgtcatgccgtctctttatgaagggctgcccgtcacgctcgttgaagcgcaggcctccggggtgccgtgcgtaatatcagacggcataacggaagaagccgatgcagggctcgggctggtcaaaaggctcagcctcaaagaaccgcccggacaatgggcatccgcggtgttacgggcagcagaggcggcaaagcctgacggggagcgcattaaagaaaccctcagacggcagggatatgacgcgggagaaaatgcgggggctgttatgaagctttacaatatgaattggaaaaaggaacagtaacgaatgattgtatatgtagtcaatatgggaattgtgtatatttggtcatggttcgcgaaaatgtgcggcgggcgtgatcaatcgctttcgaccggataccggccgaatcagctcgtcatgatcgttccgctgctatcgctcgtattggtctccggtttgcgctacagagtcgggacggattttcagacgtacgcgctgatgtacaagctggcgggaaattacggaagcatttgggagatcttcgggttcggagcgaaaaaagcagccgttgatccggggtttacggctctcatctggctcatgaattttatcacgaaagatccgcaaatcatgtatttcaccgtggcggtcgtgacgtgcagctttattttaaaggggctcgttgagttcggccgtccgtttgagctgagtgtgtttttgtttttgggcacgtatcactattacgcttcctttaacgggatcaggcagtatatggtggcggccgttttgttttgggccgtccgctacgtgatcagcggaagctggaagcgttatatgtcaatcgtgctgctgtgttcgctttttcattcctcagcgctgattatgattccggtttattttctcgtcagaaaaaaagcctggtcgcccgcgattttcggactgtcggcattgtttcttcttatgacgtttctgtatcagaagttcatttcgctttttgtcgtcgtgctggaaaacagctcatacggccattatgagaaatggctgatgaccaatacgaacgggatgaacgtcgtaaaaatcgcggtgctgcttctgccgctgtttttggctttctgctatcgggagcggctgcggaagctctggcctgacattgatgtcatcgtgaatttctgtctgctcggcctgctcttcggtcttttggcgacaaaggatgttattttcgcccggtttaatatatatttcggcctgtaccaaatgatcctgatcccttattttgtgaggatttttgatgaaaaatcaaatgcgctgatttatatcgccattattgtctgttattttctttacagttacttgcttatgccggtcgattcgtctgtgcttccgtacagaacgattttttcccggtaatggacattggaggtttatatggaaacacccgcggtcagtttattaattgctgtgtataatacggaaacttatttagaaagatgcttagattcattgctcaatcagtcgctcgccaatatcgaaatcgtggccgttaatgacgggtcaacggatcaaagcccggcgattcttgaaacctatcagaagcgggatgagagaatccgggtcattcatcagcaaaaccgggggctcggcgcggtccgcaacagggggatcgaggcggcgcgcggcgaatttatcgcttttattgatgcggacgactgggttgaacctcattattgcctgcgcatgtatgaaaaagcgaaggctgatcaggctgatctcgtgatttgcgaatatgcggccgaatttgcggatacggggaaaaccgccgtttcaacgatcgcttcagcgtacgcgggccgcccgaaacaatggtacctgaaagatttatttgaaggaagagtcagcggtttttcatggaacaagctgtacaaaagaaccatgatcgagcatcatcagctgcgctttccgcttcgtgatgagctggagcacgtggaggatcagtacttcagcctccgggcgcatgttttcgcaggtgcggtctcgtacgtggatcagccgctctatcattatcggattcacttgacttccattgtgcaaagctatcagaaaaagctgtttgactcaggtctcgttctctatcggctgaacgaggcttttttgcgtgaaaacggctgcttacaggaataccggcaggagctggattttttcatcgttcagcacggaacagtctgcctgctgaatgaatggaagcggaataacggcggccggttttctgagaagtggaagaatatcagccggatatgcgctgatcccgtgtttcgcctgagcctttccaaaaccggaacggcgccgtttgacgccaaacgctcatgccttctgcttttggcgaagctgaagctgattccgttcgtgtcgctggcatcagccgcgtatcagcgggcaatcgagtacaaaatgaaaatcagagggtgaagacatgtcgatacaatctttaaaaatcaatctcgcggaatggctgttgcttaaggtcaaatacccgtcccaatttcatttcggaacggcagcggatggggcggggcttacagcggcaagaaaaaagatcattctgacgctgctcccgtcccacgataatctcggcgatcacgccatcgcctacgcaagcaaaacgtttcttgaacgggagtatcccgattttgacattgtcgaggtggatatgaaggatatatacagatccgcaaaagcgctgatcaaaaagcgccaccccgatgatatggtattcatcatcggcggcgggaacatgggggatttgtaccggtatgaggaatggacacgccgctttatcatcaaaacattccgggaatatcggatcgttcagcttccggcgacggctcacttttctgaatcaaaaaagggacggaaggaactgaagcgcgcccgaaaagtgtacaatgcgcatcccgaccttttgttaatggcgagagatgagacgacgtatcaatggatgaagcgtcattttcccggaaaaacagtgctcaaacagcctgacatggtcttatatttggataaaagcgagcggcgcatcccgcgggaagggatctacctctgtttacgggaggataaggagagtgcgctgacggctgaggacagaacgatggtaaaagaagctttggcaaaagagtacggcgagctgcattcctttaccacgacggtcggccggagggtcagccgccatacacgtgaaaaggagctggaagagctttggaatacgctgaaaggcgcggaagccgtcgtcactgacaggcttcacgggatgattttttgtgcgctgacgaaaacgccttgtgtcgtcattcgttcgtttgatcataaagtgatggaaggctatcaatggctgaaaaacataccgaacatgacattgcttgaacgtccagaccctgaagccgtaacggccgccgtaaaccggctgctcagcggcaagcatgaggaaggcggttctttgcgcagtgtttattttgccgggctgcgctcgaaaatcagcggtgatgcccaatgaccgcgccgcttgtgagcgtgatcgtgccgatgtataagacagagccttttatgaaaaaatgcgcggtttctttaacaaaacagacgctgagagacatcgaaatcattttcgtcaatgacggttcaccggatcggtcaggccggattgctgaacaattcgccgcagaagatgcgagaatccgggtgattcataaagaaaacggcggcctcagctcggcccgcaatgccggaataaaagccgcccgcggccgttatatcggttttgtggacggcgatgactatgtgacggaaacgatgttcgagcggctttatgaagaagcggagaagaaccggctggatatcgccggatgcggctattataaggaaacgccgtctaagaaaagaacatatatgccgccgtcccttccgccgggtcgcgtcttcacagcggatgaaatgactgcattgctgacccgtgcgcacgaacatcggtttatttggtatgtgtggcgctatatataccggcgagaatcattgcaagggctgttgttccatgaagatatccggtttgccgaagactctccgtttaatttggcagcgttccgccaagccgcgcgtatcaaagtgatagacgaagggctgtatatctaccgggaaaatccgcaaagtcttacagaaacaccgtttaagccccacttagatcacgaactgcaaaagcaatataaagcgaaaatggctttttatgaggaaaacgggctgacggacgcctgccggagcgatatcaatacatatttgtgcaagcatcagattccgatgctgatcgccaacgcatgcgccgccccgcagccgtcacatcagattacggcgcacatcggcagaatcttaacgtatgacatggtaaaaacggcggtgcgcaggacgccgtgccgccataaacagctgctggcgggggagcgcgtggtgctcggcctgtgcaaaatgcgccttcctcttcttctgcatgcgtttttcgaacggaaatcgaaagagaaaggcagtgcggaaggagcatgaaatttgccattaatttcggcgccaatgtgacggcgtttttactatcggtgtttttatcagtgtggatgacgccctttattgtgaaaacattaggtgtggaggcttttggatttgtccatctgacacagaatatcattaactatttctctattattaccgttgcgctgagctctgtcgttgtgaggtttttctccgtcgccgcccacagggggaacagggatgaggccaatgcgtatgtaagcaattatttagccgcgtctgtcgtgatatctctattactcgctgtgccgctcgccgggactgctttttttattgacaagattatgaatgtgccggccgggctcttaacggatgtgaggctctctatcgtgatcggcagcgtgctgtttatgctgacgttttttatggcggggttcgcaacggggccgttttttgccaacaagctttatatcacaagttccattcaggccgtgcaaatgctggtcagggtgctgtgtgtgctcgctctgtttacgtgcctgccgccgaaaatctggcagatccagctttcggcattagcgggagccgtctgtgcggccgtgctgacttttttcttctttaagaaattgattccgtggttttctttcagccgtaaaaccttgtcattacagacgagcaaagtactgttttcggccggtgcctggagttctgtcaaccagatcggcgtgctgctgtttctgcagattgacctcatgacggccaacctcgttctggggccgtctgaggcgggtgtctatgcggcgattattcaattcccgcttctgctcagaagtcttgcagggacgcttgcttcactgtttgcgccggttttgacttcctattactcaaaaggggatatggaaggtctcctgtcttacgccaataaggctgtgcggatgaacgggcttctgctcgcgcttcccgccgcattattaggagggcttgccgaaccgtttctggcgatttggctgggcccgtcgtttgtgcagacggcgccgcttttatacattcacgccgggtatttggcggtcagtctctctgtcatgccgcttttttacgtatggacggcttttaataaacaaaaaacgcccgccgtcgttactttatgtttaggcggactgaatgtcatattggccgtggttctcagcggaccggcacatctcgggctgtacggcatcaccatcgccggtgcagtctctctcattttgaaaaatgccgtcttcacgccgctgtatgtttcgcatattaccggttttcagaaaaccgcgttttacaaaggaatgttcggcccgttggcggcggccgtatttgcctgggctgtctgccggggtatccggctgttttcaccgcttgacagctgggccggtctgatcgccgcggggcttgccgtatgcatgagctatgccgcattcgcttttttcttcatttgtacgaaagaagaaaggcggcttgctttacagaaatgccgaaaagtgaaaggagctgttcagatttgaaggcgaaacgtgtatttgatatagcggccgcgatgttgttattgtgcggcgcgagcgtcatccttctcttcgccatggcagccgtcagatgcgccatcgggtctccggtattgttcaaacagacgagaccggggcataacgggcgtccgtttacgttgtataaactcagaacgatgacggatgcgcgtgatgaaaacggtgtgctgcttccggatcatctccgtctgaccaaaacgggaaggctgatcagaaaactgagcatcgatgagcttccccagctttttaatgtgctcaaaggagatatcagtcttgtcggcccccgccctttgctgatggattatctgccgctttacacggcggagcaggcgcggcgccacgaggtgaagccggggattacgggctgggcgcagattaacgggagaaacgcgatttcatgggaggaaaaattcaagctcgacgtgtggtacgtcgacaaccgcacatttcttctcgacttaaagattctgcttttaacagtgaaaaaagttctcgtgtcagaaggcatacatcaagccggccatgtgacggcaaaacgcttcacaggcagcggaggtatgtcatcgtgaaaaaggtcgtgctgatcggaaacggcggacacggaaaagtcgtgaaggaaatcgtgcaggcccgttccgatatggagcttgcgggcgtattggatgacgaattcagcggttttgccgttcggaacggtttatatacgggccggacgaaagacgtgcacatgcttcggaaactcgtccccgaggccgtattcacgatatgcatcggccgcaacggcgtcagaaagcagttcgctgaaacgcttgggcttgaagatgacgattatgccgcactcattcaccccggggcgatcgtcagtgaaacggcttccgtcggacacggaacggttgtgatggcgggagccgtcattcaggcgggcgctgacatcggcgcccattgcatcatcaatacgggggcggttgccgatcatgacaatacaatcggagattacgtccatctttcaccgcgcgcggcgcttgccggcggagtgaaagtcggggaaggaacgcacctcggaatcggcgcgtccgtcataccgcagattgacatcggcccttggtccgttatcggcgcgggggctgcggtcatcagccggcttcccggccatgtgacggcggtcggcgttccggcccgcgtcatctcccctatccataacgaaaaaggatgatttcatgcaaacaaacaaacggatttatttgtctccgcctcatatgagcggaaaagaacaggaatacatcgcagaagccttccgttccaattggattgccccgctcggtccgctcgtcaattcgtttgaagcgcggctcgcggaatatgcgggagtgaaaagcgcggcggccgtaagctcgggaacggccgccatccatcttgccctgcggcttgcgggtgtgaaaaaaggagacgttgtattttgtccttcctttacgtttgtcgccacggcgaatccgattgtgtatgagcaggctgagcccgtttttattgattcggaatgggagacgtggaatatgtcgcccgatgcgcttgagcgggcgctgcgggatgcaaagcggcgcggcagactcccgaaagcggtgatcgccgtcaatctttacggccaaagcgcgaaaatggatgaattaatgagcctttgtgacgcatacggcgtgtgtctgattgaagacgctgccgagtccttaggatcaacatataaaggcaggcagagcggcacgttcggccgtttcggcatttattcctttaacggcaacaaaatcattacaacatcgggaggcggcatgctcgtgtctgacgatgaagccgcgattgaaaaagcgaggtttcttgcgtcccaggcgagagatgccgccgttcattaccagcacagcgagctcgggtataactacaggctcagcaacattctcgcgggcgtggggatatcgcagctggaagtgctcgaagatcgcgttcgggcgaggagagaaatctttcacaggtatcgggaagcgctggaaacgtatccgggcatccgcatgatgccggagcttgaaggaacggtttcaaaccgctggctgacggctctgacgcttgataacggcgtgacgccggaagaagccgtcgcctgtcttgcggaacagaacattgaggcccggccgctgtggaaaccgctgcatacgcagccgcttttctcatcttccgtcttttatcctcacagcgaacatgagcgtgtctctgagaaccttttcagccggggcatctgtctgccgtccgggtctgacttgtcttctgaggagcagcagcgtgtcattgacgcacttgcgcaactgtttgaaacgaaaggggagaaaacatggacagccgccatgttatgagccgattaaaagaaacgctgacgggtctgctcagcgttataccgccgcaatctgacatcatatatgccgactatcccctctatggaaatgtaggggatttattgataatgaaagggacggaggcgttttttaaagcgcacggcatccgcgtgaaacagcgctggaatcccgacaattttccattcgggcgccgggcggacaaaaagacgatcatcgtctgtcagggtggcggaaatttcggggatctctatccgtactatcagacgttcagggaaaaaatcgtcaaatcctttccggaaaacaggatcgtcatcctgccgcaatcgatctattatcaggatgagacacggcttgagaagacatcggcgctttttgcggagcacaaggatctccacctgtttacgagagatcatgtgtcatacgaaactgcaaaacacttcttttcggcgaatcatatcgggcttatgcctgacatggcccatcagctgtatccgatggcggcgtcagcggctccgtcacgcggcaggcttcattttatccgcacggatggggaaatcaatccgaagctgcaaaacaattcttccgttaaaagctgcgactggcaggatgtgctgtcagcaagcgaccgcaggggaatcgcttttttccaaacgctgaatgttttgaataaaaaagcgggaaacccgctgccgattgcgcggttttggaaacgctattccgatttcttaacgaagaaagcggtcctgtttttcagcaggtacgaatcggtggaaacgtcaaggcttcacggccacattctgtcctcacttctcgggaaaccgaataccgtcattgataattcatacgggaaaaacgccaactattattacacctggatgcacgaagcgccggatgtccgtctgatcggggaaaccgccggcacgaaggaaaaccttccgctttgaatgagcggaaggtttattttgtttctccgcgttttactttgttgtacgcctcatccaaatgctgaattcttttgagcacaaccgagtttttcgtcagctgatcctgaacaagggttgaaacgacggaacggtaatagctgttcatcgcatgaattcggtcttcattcggattcatttcaatgtgctgtgtaaagttttcaataaaataaggaacagaaaaaagttctgacatctataaagcaactccttttaataagtatatacggtatgaaaccaatcatgtacaatgaaaaaaggggagtgagcatgatggatatcaaacttcagcaaacacaaatgttaaagcctcaattaacgcaagagcttaaacaggctatcacattactcggatacaattccgcggaactggccggatatattgatgagctctcactggaaaaccctctgattgaacgaaaggaaacagacacgccgccactatcttaccataaaacaagtaaaaacaggatgaaagaacgggacggaagccagcagatcagacttacccgcaaaacactgcaggattcgctcaaacagcaagccttagatatgaagctgtccgatgatgagaaaaagattttcaattatctgatacattcattggactcaaacggatatttaaaagaggacataccagctgccgccgaccatgtatccgcttcacaagaggagacggaagcggttctgaaaaagcttcaatcccttgagcccgcgggaatcggcgccaggtctttgcaggaatgcatccttcttcagctccgccgtcttcccgagcggaacgaacaggcggaatggattgccgacgcctattttgagctatttgcaagaaagaactggaaagcgcttacactaaaaacgggcattccgcttaaagacattcaggacatcgctgacatgatcagcgcccttgatccgaggccggggctccgttatgcgcatgaggagccgggtttttacgtggaaccggatattttcatcacggtgaaaaacggcatcattcaagcgcggctcaacagccgttcgtttcctgacatccagcttcatacccattatcagccgctcttgtcagctgccgggtgccgtgacacgaaaaattatctgtcggcaaaatatcaggaatggcgctggctgaaccgggctttgtcgcaaagaaaacaaacgatcacgagaattatcggcgtcctgactgaacggcaggaatccttttttctcacaggaaaaagcggaatgcagccgctgaccttaagagaggtggcggaaacgctggagctccacgaatcaacgatcagccgggccatcaaagggaagtacgttcagacgccgtacggactgtatgaaatgaaaacatttttctcggcgaaagctgaatcgtcgggggacggcggcgcctccaattatgccgtaaaagcgcatctggaggcattggtcggtaaagaagataaaaagaaacctttttcagaccaaaagcttgccgatctgctgcatgaacaatatgacatccgaatctcaaggcgcaccgtcgccaagtaccgtgaccaattaaatattccgccgtcatcggcgagaaaacggtacagctgaaacctccccgagccaaaccccggggaggttctccgtgttacgggatcatccatgaaaacagatgatgctgtaaaaatgtaatgagacagacgagcagaagcaaaaacagactgtgcttaatcgtaaaacggaaaaggtcggcctccttgcccgccagaccgacagcggcacaggcaaccgcaatggattgcggagaaatcatttttccggtgacaccgcccgatgaattggcggcaacggagagaaccgggtccatcccgacagagagcgccgtcaccttttgcaatccgccgaacaatagattggcggacgtatcagagccggtaataaacacgccgagccagccgagcactggcgaaaaaaaggtaaacatcgcgcccgtcatggcaagcgcaagaccgagtgtcgtgctcatgccggaagcattcgtcacataagcaaagccgacaacagaaacaatggtcacgaccggaagcgttaactctttcaccgtttctataaacgcttcgccccatgtcttccacgacatgccgagggcgaacttggagatgacggcggcaatcagaatcgccgtccccgctgaaccgaaaagctcaagtttgtacacggcttcaatcggcgtgccgtccgcctgaagaatctgctgatttacaaatgggacgggaggcgtgaaggtcaatgcacgcccggctgcattcagccaggaaagccacattgacgttccttcataatgaccggttagggcagccttcacgccgggaatcccccagacggatatcatggccgtcagaagaaggaaaggagaccacgctttaaacaccgcggcgcccccgtacttgatcggcgcccggtcagcggccgctgctgattcccgttctgccgcgaaacgaaaggccgttttcggtttccaaaatttcaaaaacagagcgagcgcggccatggaaacaagcgccgacagcacatccggaagctcaggccctaaaaaattcgagcttgcgtactgcacggccgcaaaggagacgccggaaacaagaatggccggccatacctcaaaagcttttttaaacccgctcatcaaaatgattaagtacagcggaataaagacggataaaaacggaagctgccggccgaccatttgagaaatttccattgccggtatcccggtcggaccttcgacggcggtaatcggaatgccgatcgcgccgaaggcaacgggtgccgtattggcaatcaggcaaattcccgccgcatacagcggctgaaaaccaagtccgacgagcaaagcggccgagatcgcgacgggagcgccgaaaccggcggcgccttctaaaaacgccccgaatgaaaaggcgatgagcagcgcctgcaaacgccggtcatctgtaattgagagcaccgaactccggataatctcaaactgtcccgttttcacggtgattttatacagaaagaccgatgtgacgataatccagccgatcggaagcagcccgtacaccgctccctgagaagcggacatcaccgctttttccgccggcatgccgtaaacaaatacagcgattaaaagtgaaacggctaacgttaaaagccccgcgatgtaccccttcatccgtttcaccgcaagcgcccaaaaaaagaagataatcggcacgagcgcgcaagctgccgataaaagcaaatttccccctaaaggagcgtacccctgtgtccattgcatccctaaaaaacccctccttatgtcatgtaagcgattactttttatgataaggtcatctgatgaccgggttaattagcattatattttgaaagttttgaaagtacaatacttttcttgaacaaattgtctgaacctgtcggcggtgcgaaaaaagaagtataatagacgataaacatcaagattcacaagtgacggggtgatcgcgttgaaatataaacaaattaaaacgaaaaaaatctacgaggaagtcgctgacgcattgctggagaagataaaagcgggcgagcttaagccgggtgaaaagcttgattccgttcaggcgctttctgagagttttcaggtcagccgctcggcggtcagagaagcgctgtcggctttgaaagcgatggggctcgtcgacatgaagcagggagaaggcacatacataagagaatttgagccgtctcatgtttcccagccgctttcttccgcccttttgatgaaaaaagaggacgtcaaacagctgctcgaagtcagaaagctgcttgaactcggcgtcgccgccatggccgctgaaaaacgcaccgaagacgatttacaaaaaatccgccaagctctcctggagatgaaagacattgacggagacgaagaattgggcgaaaaagcggatttctcctttcacatggcgctggcagaagcatcacaaaacgggctgctcaagcatctcatgaatcatgtctccgcgctccttttggaaacgatgagagaaacgagaaaaatttggctgttttctaaacgaacgagcgtgcagcgattgtatgaagagcatgaacgcatttacagcgccgtcgccgccaaagacgcggatgaagcggaagccgcgatgacggcgcacctgacgaatgtggaagacgtgctgggggcttattttgaagaaaatgtatagaagctgacttgtgaaaggggataacatcacatgcaggccgaatcttttttttccgaccatgtaaagaaagctctgacaaacgatcctcccggggaatggatgccggcagttccgaaagcgtgcatccccctgcattccggctatcccgatcccgcactcgttcctgacaaggagctgaaagaagccgccgcccgccttctggatgaggagcgcgatctgccgctgcattatatgggaagcccgaggacggccgttttaaaaaagcagattcaagaacggttagccatccgcggcattcactgtcgggacgatgagctgctcgtgacgtcaggcgcctgtcaggcgatagatctggctgcacgtgttttcctcgatgaacaaaccgccgctgccgttgaagctccggtctacatggaagcgctcgagatttttaaaaattacacaccgcatatcatgagcattccgacagatcaagagggcctgcaaacagaaacattagcgttcatgcttgaggaaagaaaacgaaaagggcttctgcttccccgtcttctctacacgatacccgcttttcagaatcctgcgggaaccgtaatgtcagcgaagcggagaacccgcctgcttcagcttgccgaaacgtatgattttctcatcgtggaggatgatgcatacggcgagctcggattcaccgatattccgccgcccttgaaagccatggatcaaaacggccgggtgctgtacgccggttcattatcaaaagtcatcgccccgggtatgaggatcggctggattgcaggggacgccgcattcatcacggcattgtcatggttaaaaaaagacttaggccacccgttttcccaagcggtgactgccgtctatctggaacaaacgaatgttgaaaaacggctcgccgccttgcgggaagcatatcaaagcaaacgtgacgttttgctcgccgcatcagcgcgatatcttccggaatccgcatcctggcacgtgccggaaggcggttactttgtatgggtgaaagcgccgggagcggatacatccgcaatgctggcgagggctctttctcacggcgtttcctatgtccccggtaaatatttttttctgcatcaggaagacggtgcggaatatcttcgcctgtcgttcagttatgccggtaaagccgcgataaaagagggtgtgcaaaaactgggacgtctactggaaaacgggatgtagagcagcttgaggagctttcgggcttctctttttttgtccccttcagcgcatcggacgaaaggatttttcagaaaaaccttccaatccatattcagaatagtgtaggatattcatagagctttcccaaaaacaggtcatcagatgaccggatcacatattgaggatgaaagaggggttcatcatgaaagtctcattatttgtcacgtgccttgtggatatgttccagaccaatgtcggaaaggcgacggttgaggtgctggaacggctcgggtgtgaggtggattttcccgaggggcagatttgctgcgggcagcccgcatacaacagcgggtatgtgacggatgcgaaaaaagcgatgaagcggatgattgccgcgtttgaagaagcggagtacgtcgtcagtccgtcaggttcctgtacgacgatgttccgtgaatatccgcatctgtttcaggacgatccgaagtgggcggcaaaagcgcagcagcttgcggacaaaacatatgagttaacggattttatcgtcaacgttctcggggtggaggatgtcggggcggtgctgcataaaaaagcgacagtccatacatcgtgccacatgacgaggctgctcggcgtgtcggaggagccgatgaagcttttgcgccatgtcaaggggctcgagctgaccgcgcttcccggaaagcaccaatgctgcggattcggaggaacattttctgtgaaaatggctcaaatctctgaacaaatggtggatgagaaggtcgcctgcgtggaagacacggaggccgaagtgctgatcggggcggattgcggctgtctgatgaatatcggcgggcgtcttgaccgtaaggataaaaacgtcagagtcatgcacatcgccgaagtgctgaacagcagataacacgagaaacaacaaggggggaaaatcatggcgatgaaaatcggtaccgccgcttttaaagagcgggtatcagaaggaatagataatgagtttatgagaggagccgtctccggagcgcaggaacggctcaggacaagaaggctgcaggcggccgaagaattgggaaactgggaggattggcgttcacatgcggaagaaatcagacagcatgtgctggacaatcttgatttctatttggaacagctcgccgaaaatgtcgccaacagaggcggacacgtctttttcgccgaaacggcggaagaagcgtcctcctatatccgcgatgtcatccggcagaaaaacgccaaaaaaatcgtgaaatccaaatccatggtgacagaagaaatcaatatgaacgaagtgcttgaggaagagggctgtgaagtcacagaaacggatctcggcgaatacattctccagattgacgatcacgatccgccgtcacatatcgttgctcccgctcttcataaaaacaaagagcagatccgtgacgtgtttaaagagagactcgaatacaaacagacggaaaaaccggaagagctcgtcatgcacgcgcgcagcgttctccggaaaaaatttctcgaagcggatgtcggcattacaggctgcaactttgcgatcgcggataccggatcggtcagtctcgtgacgaacgaaggaaacggccgccttgtgtccgcgctgccgaagacgcagatcaccgtgatgggaatggagcggatcgttccgtcattttctgagtttgaagtgcttgtcagcatgctgacgagaagcgcggtcggccagcggcttacaagttacattacggcgctgacgggacctcggcagcaaggagaagcggacgggcctgaggaattccacctcgtggttgtggacaacgggcgttcccgcatactcggcacggaatttcaatcagtgctgcaatgtatccgctgcgccgcctgcatcaacgtctgtcccgtgtaccggcatgtcggcggacactcgtacgggtccatctattcgggtccgatcggcgccgtcttatcgcctcttctcggcggatatgacgaatacaaggagctcccgtacgcatcttccttatgcgcggcctgtacggaagcatgtcccgttaaaattccgttgcacgagctgctgctcaagcatcggcagaacatcgtggaaaaagagggcaaagcgccgatcagcgaaaaactggcgatgaaagccttcgggctcggctcgtcatccccgtccctttataaaatgggatcgaaatgggcgcctgccgccatgacgccgtttacggaagatgacaaaatatcaaaagggccggggccgttaaaagaatggacggcaatacgggacttcccggcgccgcataaatcgagattcagagattggtttaaagaccgggaaaaacaaaagggggaagaatgatgatgaaagggacggttacacatcaggaatcctttttaaaccggatcgccgaaagtctgggcagagagcgcaggaaatcaggcgtgtccctgcctgaatggaagtatcagcctcaatatcaaacgcatgcgggctgtacggaagacgatcttgtcacgatgctgaaagaccactgcgtcaacattcataccgaactgatcgaaacggatgcagccgggctttacgacgctttgcgcacgcaggtgaaccgctttgaaggagggcctgtcatcattccgaaggacagccggtttgaaacgtacggcttgcagacccttatgacagaagagtggccggatgaaggggttcccgtttgggaatgggacgcggaacaaggagcgaaaaatattgaaaaagcggaacaagcgaatgtgggcatcacattcagcgagatcacgcttgcggaatcagccaccgttgttttgtatgcgtcagagcatgccggccgttctgtcagcctgcttccgaccacctatatcgcaatcatcccgaaatcttccattgtgccgagaatgacacaggccagcgatatactgaaacagcagatcagagacggcgtcaccgttccttcctgcatcaactatattactggaccgagcaactcggccgatatcgaaatggatttggttgtcggcgtccacggacccgttaaagccgcttatatcctcgtgaatgaccgataaaaaaacaacccccggtttgcggccggggtttgtttttatataaacgcgttaatgatcatgataaaacagattgcactgacagaaataatcgtttccatcgccgtccatgtcaggaacgtttcttttaccgtcattccgaaatactctttaatgagccagaaaccggagtcattgacatgtgacagaatcaaagagcccgctcccgttgccaaaacgagaagctcactgctgacgcccggcatgacagatgcaatcggtgcaacaatgccggccgccgtcatcatggcgacagtcgctgaacctgtggcgacacggatgaccgccgcgatcgtccagcttaaaagaacgggagagaagcttgagtgtttcgccatgtcagcgatatacgtgccgacgcctgaatcaatcaggacgttgttaaaagcgccgccggctccgatcacaagcagaatggaagcaatcggtcccagacagtcattgctgaattttaaaatgctttctctgtcaaagccctgataaaaaccaaggctgaaaaaggagtaaaccgtggcgatcaaaagcgccgtgacagggtcgccgataaatttaaaagtttcatagagcgtgcttttttccggaagcgcaatttcggcaagcgttgccataagcatcaggatcaccggtaccaatatcgtaaacaatgtatttgcgaatcccggaagcttgcgtttttcattccgttcaataaattgttttttcaacagttcgggaacgggtttatgaatgcgcttaccaatccattttccgtaaagcggccccgcgatgatggcagtcggaatcccaacgattaaagaaaacaaaatcgtttttccgacattggcgtgataaatgccgacagccgccatcgccgccgggtggggcggaaccaatccgtgcacgacggaaagtcccgcaaggagcggaattccgatcgtcactaatgaaaccccggtttcaatcgcaatcgtaaacaaaagcggcacgagcaggacgaagccgacctggaaaaagaccgggatgccgacaataaaagcgacggccatcatcgcccaatgcactttctttttgccgaagcggccgatcagggtgtgggcgatacgctccgcaccgcctgattcagccatcatttttccgagcatcgtaccgagggccagcacgatcgcaagcagcgacagcgtattgccgagcccggttttcatcgaagcgataatgtccggcagattcatgcccgttgcgaaaccgacaaggatggatgtaatcaaaagactgataaacggatttaatttagcgaccgtaatcaataagagtaaaacgataatagcggcaatgacaataaacagtaacatgaccttttcaccctttcaaagaagaattaacggctttgtttgagctgaaattcactgatgacgtcaaattcatctttgagcttgtcatacagccgctcgtataagtaaaacagctcaatatatgtttcgctgtttttgacgttcggttcatggcggtgagaaattctgatccagtcctgaacatcctcgatccgttccatttcgccaaggctgtgcaaagcgagaacggccgctccgagcgccgaggcttcgtaactttccggaacgaggacttcccgtcccatcgtatcggacaaaatctgcctccacagcggcgatctcgcaaatcctcccgaagcccgcacgtcttttgcggggcccgccaaatctctcagtgcgacaccgattgaaaagacgctcatgatgacgccttccagcaccgctctgataaaatgctcccgtttatggcggaggctgatgccgaaaaacgttccgcgggcattcggattccaaaacggcgcgcgctcccctgataaaaacggcagaaacagcaatccctcagagcctgcgggcactttatcagcgatatcaatcattaaatcatacggatcaatgccgagccgcttcgccgtttcgacttccggagaagcgaattcgtctcgaagccagcgcagcataatgcctccgttattcgtcgggcctccgatgacccaatgcttgtcagtcagcgcgtaacagaatgtccgcgctttttcatccgtaatcggcgcatccgtcaccgaacgcacggctccgcttgttccgatcgtaacggccacttcgcctttgccgatcgcgccgactccaaggttggcgagcacgccgtcattggcgccgataataaacggtgtatccgcatgaatgcccatccgtgcagcgatttccggcgcaaggccgcgcagctgatgagtggtcggcacgatgtccgacagctgatcttcccggattccggcaatccggagcgcttcttcatcccaggaaagcgtatctaaacggaacagccccgttgccgaagcgatcgaataatcgacgacataagttccgaaaaactcgtgcagaatatattctttaatactgatgaatttggcggttttcgcgaatgtctccttgtcctgttctttcatccacacaattttggaaagcggagacatcgggtgaatcggcgtacccgttcttttataaatatcaaaaccgttcatctcttttaaaatacgttttgattgctcggcgctgcggttgtccgcccaaatgatgcttttggtcagcaggccgccgttttgatcgacagctatcaatgagtgcatggcggtgctgatgccgattgcaagcagattgtcagggctcagtccggcctttgtgacggcgcctctgatgcttccgataaccgcttccagaatgtgctcaggatcctgctcggcccatgccggctttggctgtattaaatcatagtgaaccgaatgcttggctaacactttgcctcttggtccgaacagaacggctttcgtactggtcgtgccgatatccagaccgataacagcttgggtttccttcataatatatcccgcctaatctgattgaataataagatagattgataatgtatgcccttacaaagtcaattataggaataatttttttataaatcaacgatgaagaagaaaatttttttcataaaattgcctcaattcccgctgtatcggcattctctcttttgaaaaataaatattacaaacgtttgtgcgcgatcatttttctgatttgctgcaagttggcgagcgttttctcctgccgcagccgggccgtggcgaaatacagtgtatcaatgaccgacagctgggcaagccttgcggacattgcttccgttctgaaagccgtctcccttgttgatgtatacagcaccacgtcggaaatctgggtgagcggcgacttttggtagcttgtaatgccgatcgtgccggcgccgagcgatttggccgttttcaccgcgtcgagcacgtccttgttgcttcccgaatgagaaataccgatgactgcgctttcaggaccgagaagacccgctgacatcgcctgaaagtgagaatccgtgtgcgcgatgcaatttatacccgtacgcataaatttatgatacgcgtctatggcgatcagcccggaaccgccgtttccgtaaaattcgattctgtctgcgcggtgaatcatttctaccgctttttcaacgtcggccgggtctaataaatgaaaggtatcggtcagaccggaaatgtttgtgcggaaaactttccggatgatgacttcgatatcgtcgtcggggctcatttcttcatgaatgtgctgcaccggctcctgaacgatctcctgagccagcgtgatttttaaatcctgatagccggaaaaaccgagccgtttgcacagcctgaaaatcgtcgcttcagagcttttcgttttttccgccagctgaatgatggaaaggtgaaccacgtctttcggttccttcacgatatggtctgcaatcgctctcaattttggcgacaaacctttgctggccgcctgaatcttcccgatgctgcttgaattcacaggggtcatgctataacctccctactcgaatgtaaacgcatacttttatgataaagcaagtttcaatataaggaaaacagaattttaaaattgttttttcaatttggcgtataaaaaaagagaaaaagccgccgatgatagaaagtgaggaggcatctggatgaaaaaagcatggattctcgtcatatcattcggcattgcgcttgcgctgtttttatacgcaaacacaaaggtgaaagcggaaagcgcggcgcccggaaagcaaagccttgtgtccggatttcagctgagactttcgaatgaccgggaaggacaatagacggcaaaaattagtattgactttgaaaatagaagactgtatattatgttactatattcagaaaataaaaactcaaaagattcatttaacataaaacactgtgaacgggagcagtaaaagaatccaatcagaaaaagagagccgcgggttggtgcaacgcggactgattgttctttgaactcgcccggaagtggcagggcggaacggaattatcggaatattccctatgtcctaacggctgaccttcgttaaaaggtttttaagctggattccggatattcgggatcaacaagagtggtaccgcggctgcctgaggcacgccgtctcttttcccaaagaggcggcgtgcttttttatgtgatgaacactttttgcgagagggcgtgtgatagatggaaaaggacaagcaaacgttaaaacggacgatgtcgtccagacacattatgatgatggcgcttggaggcgcaatcggggccgggctctttaaaggcagcagcacggcgattgatgaagcggggccgtccgtgctgctggcctacctcctcggcggaatcattctgctgtttattatgcaggggctggccgaaatggctgtcagaaacaaacatgcaaggacgttccgtgatttggttcagcagtctctcgggtcgtacgctgcatactttttagactggatctattggaaaatgtgggtgctcaatattgccgctgaggcggtcgtagccgccattttcattcaatattggctgccggaatgtccgatatggatattggctttgatcatttccattgtggtgacggtcgtaaacatgctttctgtgaaactgtttgccgagacggagtactggctcgcgctcattaaaattacagtgattgtcatctttattttatgcgggattctgctattatttttctcattcggcaatcacacggcgccggggctgtctcatttaacggatcacggagggtttttcccgcatggagcggggggcgtcattacggcgatgctcgtcgtgatctactcatacggaggaacggaaatcatcggcgtcacgctggcggagacaaaaaaccccgaaaaggtgatcccgaaagctgtccgtagcacgttaacgcggattgtcgctttttacttgctgccgtttttcatcatcgtcagcctgattccttggaatcaagtcaacagcgttcccgaaagcccgtttgtcatagtatttaagatgatcggaattccgggtgccgaccatattatgaatgccgtcattcttcttgcgattatctcgtctatgaactcgggactgtacggatcatcccgcgtcttgtttacgcaggcttctgacggccggctgccgaaaatcttttcaaaactatcgaagaaaaaggttcccgtctatgcgattctgacttgtacgtcatttttatatgtaggcgtcctgatttctttattcgcgggaagccagacgtttaattatttgatgggttccctcggctataccgtgctgttcatctggctgattatcggattcgcccatttgaaatcaagaaaacattcaacagaacagccggcttattacgtcaaatggttcccgtacacgacatggtttgcggtgcttgcgcttttggccatcctgatcggcgtaattgcgacgacatccatcgtcatcacatgcatcactgcggccatctatctcctcattacggctgcgtatctcgtgaaagggagacgtcaataaataaaaaactcttgccccgcggcaagagtttttttaatgaacggcctttttttctgcggccagagcaggtgttttcagtttctttggtgttatattcacaaaacaaatgcttgtgacgatcagaagcagtccggctaaaaggctgacggtcagcggctcatgcaggaatatcgagctgacgacaatggatatgagcgggatcaggaaggtgtaagaggcaaccttgcttgcttcccctgaaccgacaagcgtaaaaaaggcgagccagccgagcgcgataacaaaaactgaaatgaacagaaggctgagaatgaacggagctttccattgaatcgctgaaaagctttctgaaaaatggccggagctgacaagcagcacgccgccgatcagaagctgaagagcgaccatccagatagagtccgcgcgtccgcccgttcttttcacatataccgtgccgagcgcccagctgaccgcggagcctaaggccaaaagaatgccggcgatggaaatatggcctccgaaaccggctgcgctgatgacggcgacaccggcaaagcccagaataagaccggctatttttaaaggatacatcgattccccgagccacagccaagaaaaaacgcccattaaaaccggctggaaaaacacgatggctgaaaataagccggcaggcaggtaattcaagccgaccgtttgcaggccgtaaaataaagtaatatttaaaatggcagaaataagatagatcggccacgtttctttaaaacgcagctttttaaaacggggcagcgccaccattaataatagaagtccgccgatcagcgtgcggattccggcaaacagaagaggcggcgaataggcaagcgcggcctttgtcagcggccagttaattccccacaccgtgactagaaacgccagcataagagccgtctgtattttcgaaagctgtttcacgtcgttcactccttgtagaacaattccatcatatgatacggtaatcagtaagataaataaaatgaatcttttttataaggagcataagtaaaacgttatgacgattacacaactgcgggtttttgttcaaatcgctgaaacgggaagctttacaaaagcggggcaggcgctgaatatgacgcagcccgctgtcagccatgccatctctgcgcttgagtcagagctcggcatcaagctgatcatccgcgagcgccgcaacggcgtaaggctcacggacacgggcggaaaaattctcgtccatatcagagaggtgctcaaaggcatagaaaaagccgagcagctggcggccgcggaaagagggcttgaacagggaacgattcacatcggcacatttccggccgcttccgcttatttcattccaaagctgatcagcgtgtttaaaaaacggtatccgaagcttgagttggtgcttcatgaaggaacggttaacgaagtaaaggaatggctccgctcccgggtaatagatgtgggtatcactctttttcctacggaagacatggaatatctgccgctgaaaaaagataaaatggcagtcgtgcttagaaatgatcatccgctttgcagctgtgagtcaatcactctgaaagatcttgaccgccagccgatgatcatctgtgacggaggatacgaatcaccgtttattgatatgtttaaggaggcaggatctgtgctgactgccgcattcactgtttacaacgtcaatacgtccatcagcatgatcaaagaggggctgggaattgcgatattatcacaaatgtctatgtcgggaatatcgctgccggaaaatgtcgtgacaagagaactcaatcgtgcggtgtaccgagatgttctgcttgccgttccgtccgtaaaggaggcttcattggcggcaaaactttttattcaaatcgcacaggaactcacaaagaacgaataaaaaaagaccctaataatcatagggccctgaatcttatcggttaattttaaaagaatttgtcgtattgacaagttttgaaccgctgaacgtggctttgacacgataataacctgtcttgcatccttttaaagagaatgacttagtcacccttactgagaaagaaaaggttgtttttttacaagtcgtccatttctttccggactttcgctgtaagtataggtttcctttaaaagttcgatctgacggatacgctgtactgagagtaaaatcgacacttttcgcttttttcgtgtagtaggaggcatcggtaaatccgcttacatttaaatgctgctgagtgccggagtaaaagtctgcggcatatgccttatcggtgtttcctgtaaagaagattgctgccagtaaagctgttgtgagtgccattaagatttttttacgcatatagacaatgacttccttcctattcaatatcatacatatcttaacattattgggtttgttctttcaacgatagattttcacttttataggatgaaaagctcatcatatctgaatgtaatagattcattcatacagagttcactagtgacgaccgctgactgattgttcgaagatcatcgaatcaaattgtttaactcacgggaaaagctgtggtaaggtgtgtggtagagaccttgtttaagatctgcttacactaaaccgcaaaggagaaaacgatggctgaacatacattgaaagatactgcgttttccgtattgaatttatcgccggtcgtacaggggggaacggttgctgaatcgttccgcaacagcatggatttagcgcgccgcgccgaggagtggggctataaccgctattggcttgcggagcatcataatatagaaggagttgccagctcggcaacggcggtgctgatcggccacatcgccggcggcacgaaaaaaatccgcgtcggttctgggggtattatgctgccgaatcattcttcacttgtgatcgcggagcaattcggaacccttgaaacgttatatccggggcggattgacctggggctcggacgcgcgccggggaccgaccaattaacggccagagccttacgaagaaacataaacagcggggaagattttccggagcagcttgaagaattgagaaattacttcaaaccgacaggcaatgtgcgcaatcaagtccgcgccattccgggcgaagggctggacgtgccgatctggcttctgggctcaagcggattcagcgcgcgtcttgcgggagagctcgggcttccgttcgcctttgcggctcacttttcaccgaaaaacaccgtgcccgcccttgagctgtaccgcagctccttccgtccgtcagacgtactggatcaaccgtacgcgatggtcggcgtcaccgtcattgccgccgatacggacgaaaaggcggagcatctggcaacatcgcattatcaaagatttttagacctcgtccgcggcacgccgaaccagctgaagcctcctgttgaagacatggatcaaatctggtcgccgtatgaaaaagcgatggtcaatgaacagctcagttcaacgatcgtcggcggaccggagcgtgtgaaggaaaagctggaaagcttcatccggacaacacaggcggatgaaatcatggtgaattcagaaagctttgagcatgccgacagaatgagatcatttgagatcatcgccgaattaaaaaacagctgagcaaaaaaagcaatgtgccgcgcacattgctttttttattcgccgatccgcctgactgaattccggatgacgagttccggttcatacacgacgtcatccttcttcggttttttatgctctaagcagtcgatgacgtattttgccgccgctttccccataatggatttcggatgcttgacagaggtgagcttcacctcggaaatctgggcgaaatgtgaatcgtcatagcccatgaccgatacgtcatcaggcacctttaacccgaattccctgagaagattaatcgtcttcagcgcaatttcgtcattgtagcaaagaatggccgtcgggtgtgatccgctgttttgctcaagggtatgcttaattttttggagaagcacggtttctttttcttcagtcgtgtaagtgacgatcatgtccggagacgggaaaatcccgcgctcccgatgcgcctgcagatagccgttcatccgtttgacgccctgcgtgtcatccgctttaaagattcccataatgtgcgtgtggccgagggacatgacgtattcgcaagccatcatgccgcctttgacatcattgacggaaaagcttggtgcggccagctccgcataagaggcgttaatcatggcaaacggaatgccgtttttctccagattgagatagtagccgatgttgggcgtctgcagcgcgcttttcgtaggctcgacaatcagcccgtctatatttttggacagcaggttttcaagaccgcgccgttcactttctgtattgttgttggtgctcgtcagcagcatggaatagccctgttcgcttaaataagattcgattcccctgatgatgctcggaaaaatatagtctgatatgtacgttgtaatgacgccgatcgttttgtttgaatgcatggctgatttcgccgtgcgtgaagcgacaaaggtgcctccgccctgaacgctgtacagcagcccctgcgagaccaaatctccgatcgcctttctgatggtatggcggctgacgccgaactgctgcatcagctcattttccgtaggcagcttttcgtccggctgtatttttccttgattcagccatgaacaaatttcttcttttacttgagcatatttcggtagcatatcaattcctccaaaatgtatacggacaaattccagtataacatagtaagccctttcatcaagctgtaaaaataattgacagattatgaaaaactgcttattctttatttgtacgtactaatttcccttatttttagataaaattctttataagtacgtacaaatgtggcggttctgaagaaaacaaagcaacatcaagcgccgcactcagatttgtaagcgtttttattctattattcgcgggagggtaaaattcatgaagaatcacccggcaccaattggctcaaatgttcctgtcactcggcagcattccaagtggtttgtcattctcatctcatgcgcggccggactgggagggcttttgtacggttatgacacggcggtgatttccggcgccatcggtttcctgaaagatttgtaccgcttaagtccttttatggaagggctcgtgatttcaagcattatgatcggcggtgttttcggcgtcgggatttccggatttttgagtgaccgtttcggacggagaaagattttgatggcagcggcgctgttgtttgcggtgtcagcggttgtctctgcgctttctcaaagtgtgtcttccttagtgatcgccagagtcatcggcggtctgggaatcggcatgggctcctcgctttctgtcacgtatattaccgaagccgctccgccggccatacgcggcagtctgtcttcactgtatcagctgtttacgatattagggatatccggcacttattttattaacctcgccgtccagcagtccggctcgtatgaatggggagtgcacaccggctggcggtggatgctcgcttacggcatgattccgtccgtcatcttttttatcgtgctgcttatcgtgccggaaagtccgcgctggcttgcgaaagcggggcgccgaaatgaagccctcgccgtgctgacgcgcattaacggcgagcagaccgcgaaagaagaaatcaaacaaatcgaaacgtctttacaattagaaaaaatgggttcattgtctcagctgtttaagccggggctgagaaaagcgcttgtgatcgggattctgctggctttattcaatcaggtcatcggcatgaacgcaattacgtattacgggccggaaattttcaaaatgatgggtttcggacagaatgcggggtttatcacgacatgcatcgtcggtgtcgttgaagtgattttcaccattatcgcggttcttttagtcgataaggtaggccggaaaaagctgatgggggtcggatctgcctttatggcgctgttcatgatcttaatcggggcatccttttattttcagctggcgagcggtccggctttagtcgtcatcatattgggattcgtcgccgctttctgcgtatcagtcgggccgattacatggatcatgatttcggagatctttccgaaccacctccgcgcacgcgccgccggtattgcgacgatattcttatggggggccaactgggcgatcggccagttcgtgccgatgatgatcagcgggttagggctcgcgtacaccttctggatattcgccgtcattaatattctctgtttcttgtttgtcgtgacgatctgccctgagacgaaaaataaatcattagaagaaatagaaaaactctggataaaatgaaagcgttttacgacaaaagtccgctccggcgggcttttgtctgtcaccttcattccgtttctgtatataatgactgtatcaaggagatactggaaaatcctgcgaagaatgtcgaggaattgacctttaacagttgaattaacaatgtcatcctgttaaaataattaaagaaagcagacataattttttttggctatgatgggacgttttttgtcatagcgggacattttctgtccagtatgaataggaaggaacgtttgagtcatgaaccagttaatacaagctcaaaaaaaattattgcctgatcttttgcttgtgatgcagaaaagatttgaaatcttgcagtatatcaggcttaccgaaccgatcggccgcagaagtcttgctgccagtctcggattgaccgagcgcgttctcagaagcgaggttcagtttttgaaagaacagaatctcatcgatattaaaacaaacggcatgacaatgacggaagagggctattcactgctttcgattctggaagatacgatgaaggatgttttaggattgacgcttctggaaaagacattaaaagagcggcttaatctgaaagacgccattatcgtttccggagacagcgaccaatctccttgggtcaaaaaagaattagggagagcggccgttgcatgtatgaaaaagagattttcaggcaaaaatatcgtcgctgtaaccggcggtacgacaattgaagccgtcgccgatatgatgacgccggattcaaaaaaccgcgaactcctgtttgtgcccgcaagaggcggtttaggcgaagatgtgaaaaaccaggcgaacaccatatgcgcgcatatggcggaaaaggcttcaggcacttaccggcttttgttcgttcccgggcagctgtcacaaggcgcctactcatctattattgaagagccttccgtaaaagaggtgcttcacacgattaaatcagcgagtatgctcgttcacggaatcggcgaagctagaacaatggcggagcgaagaaacacgcctttggaagatttgaagaaaatagatgacaatcatgcggtgacagaggcattcggctactactttaatgcggacggagaagtcgttcacaaggtgcattcagtcggaatgcagcttgatgacctcgatgccattcccgacattatcgcggtagcgggcggatcatcaaaagcagaagcaatcgaagcttattttaaaaagcagcgaaacacggttctcgtcacggacgaaggagccgcaaagaagttattaagggataacagtccctcaatataaatatctctcacttatttaaaggaggaaataatcatggcagtaaaagtcggtattaacggttttggtcgtattggacgtaacgtattccgcgcagcattaaacaatcctgaagttgaggtagtagcggttaacgatttaacagacgctaacatgcttgctcatcttttacaatatgattccgtacacggaaaattagatgcagaagttaaagttgacggcagcaaccttgttgttaacggcaaaacaatcgaagtttctgctgagcgcgatcctgcgaaactcagctggggcaaacaaggcgttgaaatcgtagttgaatctactggtttcttcacaaaacgcgcagacgctgcgaaacacttagaagcaggcgcgaaaaaagttatcatctctgcacctgctaacgaagaagatatcacaatcgttatgggtgttaacgaagacaaatacgatgcggctaaccaccatgttatctctaacgcatcttgcacaacaaactgccttgcgccgtttgcaaaagtacttaacgacaaattcggcatcaaacgcggtatgatgacaactgttcactcttacacaaacgatcagcaaattcttgatcttccgcacaaagactaccgtcgtgcgcgtgcagcagctgaaaacatcattcctacatcaactggtgctgctaaagcagtttcccttgttcttcctgaactgaaaggcaaactgaacggcggagctatgcgtgtgccgactccaaacgtttctcttgttgacctagttgctgaactgaacaaagacgtaacggctgaagacgtaaacgcagctcttaaagaagcggctgaaggcgatcttaaaggaatccttggctacagcgaagagccattagtatccggagactacaacggcaatgctaactcttctacaatcgatgctctttctacaatggttatggaaggcagcatggtaaaagtaatctcttggtacgataacgaaagcggctactctaaccgcgttgttgaccttgcagcttacatcgcaaaacaaggtctttaattcatagctcccggaaagggccggacttggttctttcggacagaaacgctataatgaaagcggacaagggaaggggacggactccctttccctttttccatgagaaccggctttcagaaagcgccggattgctgcagaacgtccgcgttttgaagtttccgcggcactttcgttttctgagccgcctgccctggctcagaagacgatctgccccgtgcccggaagctgcaatctgccccgcggcggaagcatcatgaggcggtttcacgtttcacgtttttcgtgctatgcaaaccattttgaaggaggatctcctaaggcatgaataaaaaaacagtaaaagacatcgacgtaaaaggcaaagtcgtattctgccgcgttgactttaacgttccaatgaaagacggggaagtaacagacgatactcgtatccgcgctgcgcttccaacaatcaaacaccttgcagaccaaggcgcgaaagtccttcttgcgagccacttaggccgcccgaaaggcgaagtggttgaggagcttcgtttaactcctgtcgctgcacgcttaggcgaactgctcggcaaagaagtgaaaaaagcggatgaagcttacggcgatgctgtaaaagcacaaatttctgatatgaaggacggagacgttcttgtattggaaaacgtacgtttctaccctggtgaagagaaaaacgatcctgagcttgctaaagcatttgctgagcttgcggatgtatatgtcaatgacgcattcggtgctgcccaccgtgctcacgcatctacagccggaattgccgagcatctgccggcggttgcaggattcctgatggaaaaagagcttgacgttctcggcaaagccgtgacaaatcctgagcgcccgtttacggcaatcatcggcggcgcgaaagtaaaagacaaaatcggcgtaatcgaaagtctgcttgataaagtggacaacttgatcatcggcggaggtcttgcttacacattcgtaaaagcgcttggttatgaagtcggtaaatctcttcttgaagaagataaaatcgaacttgcaaaatcattcatggaccgcgcgaaagaaaaaggcgttaaattctatatgccggaagacgttctcgttgctgatgatttctctaacgatgcaaacgtccaaatcgtgccgatctctgagatcccaagtgatttagaagcgatcgacatcggaacgaaaacccgcgaaacgtacgctgaagttatcaaaaacagcaaacttgtcgtatggaacggaccgatgggcgtattcgaaatcgacttgttcgctcaaggcacaaaagcagtggctgaagcattggcagaggcaaacgatacatactctgtcatcggcggaggagactctgcggcagccgttgaaaaattcggccttgctgacaaaatgagccatatctcaacaggcggcggcgcatcccttgaattcatggaaggcaaagagcttccaggtgtagctgcgctgaacgataaataaaaactgctataaggaagtggaacagatgagaaaaccaattatagccggtaactggaaaatgaacaaaacactcggcgaggctgtcagcttcgttgaagaagtgaaatcttccattccagcagcagacaaagcggaagccgttgtttgcgcaccagctcttttcttagaaaagctgacttctgctgttaaaggaactgacctgaaagtcggcgcccaaaacatgcattttgaagaaaacggtgcgttcacaggtgaaatcagcccggtcgctctgaaagaccttggcgtggattactgcgtcatcggccactctgagcgccgtgaaatgttcgctgaaactgatgaaacagttaacaaaaaagcgcatgccgctttcaaacacggcattgtgccgatcatttgcgtaggtgaaacgcttgaagagcgcgaagccggaaaaacaaatgatcttgttgccgatcaagtgaaaaaaggtcttgcgggtctttctgaagagcaagttgccgcttccgttattgcgtacgagccaatctgggcaatcggaacaggcaaatcttctacagcgaaagatgctaacgacgtctgcgcgcatatccgtaaagtcgttgctgaaagcttcagccaggaaactgctgacaagctccgcattcaatacggcggcagcgtaaaacctgcaaatattaaagaatatatggcagagtccgatattgacggtgctttggtcggcggcgcaagccttgaaccgcagtcattcgttcaattattggaggaaggtcaatatgagtaaaaaaccagctgcactcatcattcttgatgggttcggattacgcaatgaaacagtcggaaacgcagtcgcacaagcgaaaaaaccgaatttcgaccgttattggaaccaataccctcatcagacgctgacggcatcaggcgaagcagtcggactgcctgaaggacagatggggaactctgaagtcggtcatttgaatatcggcgcaggacgtattgtgtaccaaagcttaacacgcgtgaacgttgccatccgcgaaggcgaattcgaacgcaatcaaacgttccttgacgccatcaaaaacgcgaaagacaacgacaaagcgctgcacctgttcggccttctttctgacggaggcgtacacagtcatatcaatcatttattcgcgctgctgaagcttgcgaaaagtgaaggactgacgaaggtgtatattcacggtttcctcgacggccgcgatgtaggtccgcaaacagcgaaaacttacattcagcagctgaatgagcaaatcgaagaaatcggtgtcggcgaaatcgccagcatttccggacgctactattccatggaccgcgacaaacgctgggaccgtgtggaaaaagcgtaccgcgcaatggcttacggcgaaggcccgtcttaccgcagcgcgatggatgtagtcgacgattcttatgcgaacggcattcatgatgaattcgtcattccgtccgtcatcacaaaagaaaacggtgaacccgttgcgaaaattcatgacggcgattctgtgattttctataatttcagaccagaccgcgccatccagatttcaaacacgtttaccaacaaagatttccgcgatttcgaccgcggtgaaaatcatccgaaaaacctgtatttcgtctgcctgactcacttcagtgaatctgttgacggatatgtggcttttaaaccggtaaaccttgacaatacggtcggtgaagtattggcacagcacgggttaaaacagcttcgcattgcagaaactgaaaagtatccgcacgttacgttctttatgagcggcggccgcgaagaagaattcccgggcgaagagcgcatcctcattaactcgccgaaggtcgcgacatatgacctgaagcctgaaatgagcgcgtatgaagtgaaggatgctcttgtaaaagaaatcgcggctgacaagcacgacgcgatcatcctgaactttgcaaaccctgacatggtcggccactccggaatggtcgaaccgacgattaaagcaattgaagcagtggacgaatgcttaggcgaagtggttgacgccatcatcgctaaaggcggacatgccatcattaccgctgatcacggtaatgcggacattctgattacagaaacaggcgaaccgcacactgcccatacgacaaacccagtccctgtcattgtgacgaaagaaggcgtgacgctgcgcgaaggcggaatcctaggcgacctcgcaccaacgttattagaccttctcggtgttgaaaaaccgaaagaaatgaccggaacatctttaattcaaaaataagcgtaaatcaaaaggagagacaaactcatgccatacattgttgatgtttatgcacgcgaagtccttgactcccgcggcaacccaacagttgaagttgaagtatatacagaaacaggagctttcggccgcgcattagtgccaagcggagcttctacaggtgaatacgaagcggttgagcttcgtgacggcgacaaagaccgttaccttggaaaaggcgtgttaactgctgttaacaacgtaaacgaaatcatttctccagagcttctcggctttgacgtaactgaacaaaacgcaatcgatcagcttttaatcgagcttgacggaactgaaaacaaaggcaaactcggtgcgaacgcaatccttggcgtatctatggcttgtgcgcgcgcagctgctgatttcttacagattcctctttaccaataccttggaggattcaactcaaaaacgcttcctgtaccgatgatgaacatcgtaaacggcggagagcatgctgacaacaacgtagacattcaagaattcatgatcatgcctgtaggcgcgcctaacttccgtgaagcgcttcgcatgggcgctcaaatcttccacagcctgaaatcagttctttctgctaaaggaatgaacacagctgtaggtgacgaaggcggattcgctccgaaccttggttctaacgaagaagcgcttcaaacaatcgttgaagcgatcgaaaaagccggcttcaaacctggcgaagaagtgaaacttgcgatggatgctgcatcttctgagttctacaacaaagaagacggcaaataccatctgtctggcgaaggcgttgtgaaaacatctgctgaaatggttgactggtacgaagaaatggtttctaaatacccaatcatctctatcgaagacggacttgacgagaacgactgggaaggccacaaacttcttacagagcgtcttggcaaaaaagttcagcttgtcggagacgaccttttcgttacaaacacgaaaaagcttgctgaaggtatcaaaaacggcgtaggcaactctatcctgatcaaagtaaaccaaatcggtacattgactgaaacgttcgatgcgatcgaaatggcgaaacgcgcgggctacactgccgttatctctcaccgttcaggtgaaactgaagacagcacaatcgctgacatcgctgtggcaactaatgcaggacaaatcaaaacaggtgctccgtcccgtacggaccgtgttgcgaaatacaaccagcttcttcgcatcgaagatcagttggctgaaactgctcaataccacggtatcaactctttctataacttgaataagtaatggaatggacgccgggagatattctcccggcgtttttttatgctcccgggcttttccctcctttttcatcattttcatttggtcaataatattcatttttcccctttttaaaggaatcagtgttcttcaatcgaaagggaagaggtgttaataagaggagggattatgatgaaattttcatttatgtcagccgcggtggcagcaagcgtcatatggggcgcgtctgccgggccgctgtccgaaactcatgcttattcagccgtgaccgcgccggtttttgatgctgatgaggcattggacacgatgcatgatctgagtgaaaccatcggaccgcgggaaaccggaactgcgaaagaaaaggaagcggctgaatacatatcgaatcgcctgcgggctcagggcgtcagtgtcaaagtacagtcatttccattgaaaaagtacttttcaggttcagtcacagcgggagatcatgaatttccgctccgctccgctgatcaatccgctgttgaaaaagagctgagaattgagggagggatttttgacggcggctgcggatcacgcgatgacgtaacaggagccaaaggaaagattgcagtgatacgcgaaggaaagatccccgtttctcaaaagatcaaacatgccgaacaagcgggagccaaagcagtcattatttataatcagacaacaaaaccgctcgccgtccgtccgcataccgataaaggaatcacaataccggcggcgggtatgaaaaaagaagacggtgaagcattgctgaaggaaaagcaggcagtcattcaatttaaaaactataaaaaccgcacctcacaaaatattataggaacgcgcaaagcagcacaggccaactcttctgatgctgatattatttatgtcacagcgcattatgacagcgtaaaaggcgcacccggagcggatgacaacgcctcaggcacatctgccgttctggaaatcagcaagcaactcaaacacataccgaaagacaaagagatccgctttatcctgttcggtgcagaagaattatggtctgcgggttcatcttattacgtcagtacactcacgaacaatgaaagaaagcacagccaggccaattttaatgccgatatgattgcgactgactgggaagaagcgagtcaaatgtgtgtcacgactcctgacggcaaggaaaacccgagcgtccggtatgctgaaaaagccgctgaaaaatcccgcttggtcaagccaaacctgattcagctcggttactcagaccatgtctctttttatgaagcagggattccgtcggctaactggatttggctcagccccgatacacaggagccggggccttggtatcacaccgagaatgataatatgaaacacatcagcaaagaacgattagagaaagcgggagcactcgtttccgcggctgtaactgaggcagtgaaagaataaaagacaggcttcggcctgtttttttatattgttttctgtatattctctcaattgagggagattttctcactcgttaccagatatataccatttgacaggattttattttacaaataaaagaaaaataaatagataatacctaatttataaaaggatgtaaaactcatttatcaaattttaacttttgttataattgcgatatcgatcgatatttgttttaaattgtaaaaaacaatactcttttctatctattagggggcgaaaaatgaatactgtcacaaaagaagccagcaaccttggtcaaaaacggctgttacatctgattgaaacgaagcaggcgattgtaggcgtgttaggcatgggatatgtgggattccctcttgcgctggaatgtgtcgataaaggatacaatgttatcggattcgacaaaaacagtgaaaaggtttccttgttagccgccggaagcagccatattcaagatatagaggacgacagactgaactcggctttacaaacaaaacgctttcaaatcagcgccgacatgtcgctcatccaaaaatgcgacatcattgtgatatgtgtgccgacacccctgaacaaaaaagacaagatccccgatttaacctacatcgacagtgcagttgacagcatgattgcttatggaaggcagcatcagcttttaattttagaaagcaccacctatcccggaacaacgaaaaaaaagattgccgacagaatggcagcaagccgcggcatgaaaataggaacagacttttttacggcttattctccggaaagaatcgatccgggcaacaggcaatatgaagtttcagatattcctaaagtagtcggcggaaccacacagacttgcacagaacttgcctcagcgttttacagcaccattgttacaagcattcacccggtcacctcacccgaagtagctgaaacagctaaactcctagagaatacttatcgttatgtcaatatagctcttatcaatgaaatggcgcttaattgccgtgaacttgatattgatatatgggaagtcatctgcgcggcggacacgaagccgttcggctttcaaaaatttatcccgggccccggagtcggaggccattgtatcccgattgatcctttttacttcaaatggatcgcgaatgaaaaagggctgcagacaaaattaattgatctcgcggacgaaatcaattccaacatgccgatttctgtctctgactatgctttgaaactggcgggcaaagacaaatgcagcatcttaataataggggccgcttataaaaaaaatacaaatgacccgcgtgaatcctcagtgtttacgataatggaagaattgatggacaagggatgcgcgattgattatcatgatccgtttatcagcgagatccgcttgaatgacggaagctgcaaacaatctgtccctttcacaaaagaacaaatcaatcagtacgacgtcatcatcattcatacagatcacgatgtcatcgactacagtattttgaaggatgtctcaccgattatctttgacacaagaaatgtatgcaaggaaaaatcagccgacaattgcagagttgtcactttataggagggaacggtcattagtaatcgatttatctcttttcacagacctgatatgacaagcgaagaaatcgcaagcgtaaccgaaacgattcaatcgggctggatttcgaaaggcccgaaggtaatcgattttgaaaaaaagctgggagaatgtataggagccgaacacgtcatcagctgtaattcaggcaccgctgcattacatatggctttattggcgctcggtgtgggagaaggcgatgaagtcatcgtgccgagcttcacgttctgttccagcgtcaatgtcatcctgcacgccggagccgttccggtgtttgcggatatatgcgagaaaagtctttgtgccgatcctgaagatgtccggaagaaaataacgccgcgcacaaaagcggtaattgcggttcattttgccggctatccggctgatctggaaaacttgcaatccatttgtaaagaaaacggattgtatctgattgaagacgccgctcatgcgctcggtacaaaatataacggaagcatgatcggcactcacggcgatgccgtgtgcttcagcttttatgccaccaaaaatattacaacgggggaaggcggagccctcgtcatgaaagacgaacaggccgcagaaagagcgaggctgtacggctggcacggcatcacaaaaaatgcctggaaccggtacggtgaaaaaggcagctggagatacgacgttttactgccgggctttaaatataatatgacggatattcaggccgcgctcggtctggttcaattgaagcgcgcaaacgacattcaagaaaaacgggaacagatcgctcaattttatgtacgtgaactgtcaggccaatctgacaaagcggcgcttccgctttctgacattccaaacggcataacgcactcatggcatttatttattttgcggattcgagaaaacggcggtatggacagagatctgtttattgagaaaatgaaagaaaaacaaatcgggctgagcgtgcactttattcccgtgcatttgcatccttactataaaaaacattttcctgcggagcttccggtaactgaacgtgttttccgggagatcgtgtcactgcctctttacagccagttatcagatgaggattgcagctatattgtcaagtctataaaagaagttttgactatcagccaggaggtaggatcatgaaacatattgcgattatcggaggagccggttttatcggaagcgaactggcggcattattacaggctaaaggttatcacaccatcattgcagaccagaagaagccggcttttgacactgaataccgccaaacggatatccttgaccggacgtccctccgcgaatcactgcggggagcggatgcggttgtccatttggcggcaatggtcggagtggacagctgccgaagcaatgaagaagacgtcatacgggtcaattttgaaggaacaaaaaatgtcactgaggtatgcggtgaattgggaatcagcacacttcttttctcatcgagttcagaagtgttcggagattcaccggattttccttataccgagacaagcagaaagcttccgaaatcagcttacggaaaagccaaactgcaatcagaggaatatttgagagaacaggcttccgacgaacttcatattcgggtcgtccggtactttaatgtatacgggccgaaacagcgcgaggattttgtcatcaacaagtttttcagcctggccgagaatggctctgagctgcctctttacggggacggcggacaaatacgctgcttcagctacatcagtgatatcgtcaccggaacttatctcgctctcattcatgaaggagccgtctttgaggacttcaatatcgggaacgaccagccgatcacgataaaagaactggctgaaaaagtcaatgtgctctcaggcagagagaaggataactatctgtttaaaaagctgggcgaagacggcgtgaggggaaaagacatcgaaatttttaagcgggcgccgtcaatcgagaaggcgaaacgtttgctcggttacgctccgaaagtaagtctgaatgaaggcctggagatcataaaagatgaaagacaaaagcacaaactttcactttcctaaaaacccggaagtggtcaaatatcccgtttatcccggacagttttccgtcagcggccgtctgcgcgcagtgaaacacttgcttactgccggacaaagcggactgactgaaaaactggaaaaacgttacggaaaaggggttgtgctgacctccagcggcagtgcggcactggtgctcgcattaacttattcgggggccgggccggggaaagaagtgattttctcatccttcagctgcccgaatgtcattgatgccgtgctgcaatccggtgcgacgcctgtgtttgcgcagctggatgagcatctattcttatcttttgaggatgtcaaaaaaaaagtgacgaggcgtacgtgtgcggttatcctcacgcatgtatacggccggagagaaaataccgctatcattgactgggcgaaggaacacggaattgctgtcattgatgatgccgctcaagccatgtttacaaaacaagcggatacatttgccggcggtttgggcgatttcggcattttaagcttcggcccctcaaagccgcttgcgagtatcggaggcggcgcgttaatcgcgccgaaagaatggcttcggcaaaaagcaaatctcccgatggaacagcgcagccaagtggcagctgactatcgaatctatatcagaaatcaaagaatccaagctgtaatgaaacggaaacggcatcatcctatttcatatatgtttagaaaagcgggcgccatgccttccatgaaagccacaaagctcgaagctctgccggataaaccggctgttgtacccgtgcttcgcatgcatccggcaagggaagccattattgatgatcagctttcacgtatggatcagcttgtaacagcttcgcttcgaaacttagagacggcgggagaaatctttgcaaaggcgggagaaacaaacggcataagaatgatccagccccaagaaggagaacatctgaattatttaacaattgtatttccccgggatgaagagcggtacgggtgttccgtttatttagccgaaagaggcatccaaacatgctggaactaccttcccctcgaacgtattccgatttatgaaacatacgcgggggaaggcggggaagacccgctttggaagagagttctttctctgccttttaaacctcctcttcaaaaggagcaagtcagatatatagccgaatccgttttatcatattatgagcaaaagaataagactgaatagtggtgataactatgcaaaaaacagcagtatgcacgacccgccaggcatgggatcgggccgctgacatgtatcaggcggggttgtttcaaagctatgattggggaatcctcatggaagagcttcccggcacgtcatttcaccctgtcagactgacaacggacggaggacaggtcatctatcttccgctttttgaacagaagggcgtattatccggcaacatgatcggatacggcggcgttatttcagatcgccccatctcatttgaatggcttcaaagtgaaatccaggccatattcggtcggaacatatcccggatgctgctgccgtacggtcagacttcttttacagaagaaatcagggaaggatggacggaaaaggcaacgcggattctttcgcttccggacacgtttgacgagctttggacgggcatttccggaaaagcccggacggcagtcagatacgctgaaaaagagaatattgtcacccggctgatcgggcgaaaagaacttggcgcgttttatgacctctacaaagagcatacagcgtcaatcggcgcagcttatgtgctgagccagggctttttccaaaagctgcttgacacgtttgcggaccggatgttttggatcggagcatatcaggatgagacgctgatcagcagcagtatttttctctatgaccgctctcatttctattattggcagaatgtaaacagcctggcgggaaaaaaagcgcaggcctcttacttattgatgcgtgacgccctgcaattcgccatttgccgcaagcttcaatgggctgattttggctattcacacagtaaagaaatcgcgagaccgaaacgatattggggagctgaagaaaaacaatgccgactttttacgaaaccggaatgaaaacaataagcggccatcaatccagttatctgccgtggtacggtttttttgaaaaaatgtataagtcggatctgtttgccattcatgacacagcccaatttgagaaaaaaggattcctcaaccgcaacagaatcaaaacgccgcaaggccccagatggctgacagtgcctttgcagatgaaacaatataaagacatagagcttcggcatatgaaaatcgaccagacacaggattggcggaaaaaacattggatggcgattaaaatgaactatgcgaaagctccctattttgagcgataccagcatttttttcaagatgtctatcagcgggagtgggaatatctccatgatttgaatatgcacatcattgaatttttccgaaaagagctccgaattgaaacgccgctctgttatgtctctgagcttgaatgccggaaggagaaaaaaagcgattttgttttagcgctttgtcaggagctgggggcggaccgttattattcaggcagtcagggttccgactatttaatagaaagcgattttgaaagaaacggaattgtcattgagtatcagcagatccgacattttggctatcctcaattattcggggagcatatccctcacctctccatgctcgatatgctgatgaactgcggagcggatacagctgaaatgttagttaaaggagggcaatatgatgaaagtaatggtatttgcagcgcatcccgacgatgaaattatcggcgtcggcggcacgctcgccaaacatgtccgccaaggtgacagcgtgtcggcagtcattatggcggaaggcaagtcatcaagaaaaacggattacaaaaagcctgaagattccgttatggagcattctaatcaagaaacggagcaggcgctcagcactttgggcatccatgattttgtcaggctgaaccttcctgataacagaatggattcaatggatttgctggatgtcgtgaaggaagcggagaaacaaatcaatcgttttcagcctgacattgtgtatacccagtacggcggtgacattaatattgaccactccgtcgtattcagagcggtcatgacggcaacccgtccgcttcccggtcatacggtaaaacgggtttttgcctatgaaacattgtcttcgacggaatggaattactgtcagaaggatcagtttcatgccaatttcttcgttaatattgaaaacgagcttgaaacgaaattgaaatcgatggcgtgttacggttccgagctcagagacttccctcatccccgctctttgcaggcgatcgaacataatgcccgtgtgtggggagcaaaagcgggtttttcggctgcggaagcgtttatgcttgtgagaggaacatggtgactgtcctatgattgctcaaattccgtttttcggacttgatccgaagcaaatcgatgagaaatgggtggaagcgggatacggtctggaagcgaatatttttgacggccattcctttggggaaacggattatctcaaaacattcaatcagacgctggaatatgcgaaacagcttgatccttcattattgacgctgcatttcccgacagatcatgccgattatgtgcatgaagatcacatcaaaaaacagctttatcactttgcggagctagctgtgaaatacggcgccaaaggcataaccgttcatgcgaatcaatttatgacggttgaggaatttcaagtctatgacctggaaggaaaccgtaaaaaaatcgttgagtttttcgcggagtttgatgagcggctgaaagggacagacatttggatcggtgtggaaaaccttccgatcatcgggaatctgggagaggattttgatccgattttcatttatcctgaggattttacagagctggtggagctggatctgaagcatgtcggtattacgtgggatctgtgccattgggcgattacctatcagactcacttgtcttccgcccttatgttcagaaatgatcagctgaaatatcccgatttctttcagtttctttcgataaaagagagcattaagcattatcacttcagctcatttcgccagcttgcgttcccgcatggcggcgtccgctgttttgagggccgccatccgagtgaagggacaatcgctgaggagctgctgagacgtgctgcagatactttgcaggagctttatcggactcaagataccggcattgtatttgaggtgatggaagaggattatacggaaagacgggaatcatggagaacgctggaatggttcggcggtgtttctgatgacgaggatcaaaaaagggtctgatatgacatatcgaacaccgaactatgcaaagctttggtgtgcacaggtgttttcttcagcagcggatggggtctggctcattgctttgccgctgttagtgttagaattgaccggcagcaaaattctagtcggcgttatttcttttatcgaactcgtgccgttgacatttggcgtgctggcggggccgctgattgatttattccgaaaaaagtcgatcttgtatttgtgcaatacgggccgggccgccattatgatcctcttggcggtgctcagcgcgaacgatttattaaccgtgtggatagccggggtgtgcgccttttgtctatctctgcaatcgatgctgtttgcgccggcgaaagtcgcgatcattccgctgctcgtccgcaaacagcatcttgatcaggcgacatctctgatcaatacgagtgacttgatcggactcatcgtcggaaaattgatcagcgggatcatgattgcggctattccgttcgggatgctgtttgccctaaacggcactgcttttttgatctctgcggcatttatcgcgttcattcgtatttcagaacagcccaatgaaaaaagcaacggaactgaagatgtaaaagccggttacagaatgctgaaaggaaatgcggcatggctgacatcggtcggatactttttcgtcgtaaatctcgtcattgccggccttatttcagtaatggggccgattcttgctgtggagcgttttcagcagaactattctgtatggtttgccgtcatgtattcaatgtttcaggcggggatgcttttgggcaatctggccgtatttttcaaatggaatacaaaacgcttgaaccggctgtacccgcggacgttaacggtagcgggactgctcattatgctgctgttttttccccttcatgggtttgagtgcatcatcttcctggtgcttggcatcatcatctcgtatattgatgtgcaaacggtgctgtatttccaaaagacggttccggccgcatatttcggaagggtctttgcactgattttttccattgtcaaaatgggtgaaccgctgtcggccgctgtctacacagggcttctgctgttgatgaatgcggattatattttcgcggcggtcggactgacccttacgatcgtttttgctattttttcagtcagacaagggagtcaaagaaatacagagaaacaagcggatcaatccgtctgaatggtaaacgaaggggcgccgatgtcagccggcgccctttttatcataaatccaaataaagccgtatcatatcccggcattgaatgccgttttcaaaaatgtcttcatcataatgtctgataaaaaaatcatggtcgacagcctgaatgcggaatccgcatttttgatagagtgacagctgatgaatactggaatttccggtgccgatttcaatcgtgtcagctcccgattgtctcgctttttcaatggcatcccgcaccagctgttttccgaatcccctgttctgcagcgattcttttaccgcgatgtttacgatttctatcgttttaggccttgtttgcaataaaacgtaaacccctgcaagctcgtctgacgtccaagccgtatagcattctcctcttacaagataatcatcgacaatctctttcgacggatcggccagcagcaatagttcatacagcgcttcatccggctccgcggcttttcggatgctcagtttttgcatgtccgtttctcctcctccgttatgatcgacagctatttttgaaaataactccaaaatcattctactttattataaaatatgaaacataggaaaagttatacaagttttgcagattgaataggaggaaagtcatgtttttttgtaagcattgcggccagcagaacaatgaagaagcgcatttctgtaaagaatgcggaaaaccgatcgggaaaggaagccggctggagcggcaggcggctgtaaaagcggctgaacctgcttcacaaatgagaaagccgatccctaaaaaaacgctcttcatgtggggcggcattgccgcagcgctgatcttattgattgccgcatataaaaccggagcctggctgacatctgaaaaaaggctcacggatcaattcgaacaggcggttcatgacggggacacgaaaaagctcgcagccctgctcactccttcagacaaaaaactgaagctgaatgagaccaatgtcaaaccgctccttgcatacgcaaagaaacacgatgaactgctggcagcgcttcgcggcaattcatcagaaacagatgcggtatacgttaaaaaagagggaaaaacccttcttttgtttgaccattacgaactgaaagtcgatccggtttatttccgcgtcacaagcaattataaaggcgccgatctttatatcaacagcgagaaaacaggtacggtcaaaaaagccgatgaaatccaaatcttcggcccgtatgcacccggtgtctacacggcggaagccaagcttaaaaatgagacggttgacgttgtcaaaaagcaagaggcagaggcggccggaagccggaatgttgagtttgacctgccgttagacgccgaggatgtgacattcactcaagcagacagcttcaaaagcgcgaaaggcgatctgctgataaacggcaagtccgtccataaagatccgtttacatccgttacatatggtccgctcttaactgacggttccatgacagccgccgtggaggctgattttccttgggggaaaatgaaaactgccgatgtcccgatcaacagtactgatgtggacttaacgcttatcccggatcaagatacacaacaaacaatcatggacacgattgtcaaaacaacgaagcagtatacaaaagcgatggcagacggaaataccgatcagatgaccgaggctggttccgcctggaaagagcagacgaaagaagtggtatccggcatgaagagttccggcacctttttgaaggatcagtataaagagacaagctttgatctggattcatttgcgatttctcaagagaacggccgctggcaagtaactgttacgggtaaagagcttcatgagtctgcttatttcgacgggaatacgaagcctgatatggaagaggctgagccgagctttcactatgtactctcatatgatacaaaacataaaaaatgggttttcgaaaaagctgaccctgcctcagattcttctgggacaaatgtaaaaaaaataaaaaacgaccagccgaaaacctatacatccgcatgggcatcttccaaaggaaacacagcttcaggcagcgtgacaaacgagcaagtcacatcgtttatgactgattacctgacaaatcaatcaagcgccgtcagccttaacaattttgccatcatggcgggtaatttagaagagggaagccctttgtatgctgatcagcagaaactggtcaaaaaactgcacagcgaggggacgaccgaagtatttaatgaagtgaatgtcaaaagcttttcacagaaaggctctcatctgacgattcacacgtacgaggagttttatattacgaaagccggcggcagtccgaagctcagaacatacaattggacgtatggcggcgttgttaaagacggaagaatttatttaacatccattcaataaaaaaacccccgcgccaatcaggcggcgggggtttccgtttttaaaagaagaaataattcatgagttcttttatataatgcttgatcgtgaattgaaacgttacgcaaatgatcaaatagatgacgataacagaataaatgatatccgccttagtagtgagctgatgctgatagctcgccagcatgagcggaggcacggcaaacgccgctcctaaaagaccgacagccagaatggtgaagcaaacggttgtatgaagcagcataaaaatgagggcaagaagcaaaatagctgtaaacggaatcaaaaatgccccgaatctggacagcgaatctttaaatgacacctgggcgccgccggccttcaaagcgataaaaatcaagagatacaggcaaaaaacgcataatgcaaaggtaagcgccggcttgatcacaaccgcggtaaaactgacgtcacgaaagccgtctgataagagaatataaaacataaccggcgtcaccaggcagaaaagcaccatgttgatgatgctgctgacaagctgttcgccgcctgtcgttttacatgtttgatacggtcgctttaacacatcaagcacgaataaggcaaattgctttgaagcctgcttagccgcggcgccggcctgagcggcctggccttgcgtttgacctgcgcctccctgcccgggctggggcgccccgcacttttcacaaaattttccgccatcagtatgatggccgcattgagaacaatacattctaaaactccttttacaagtaatatagggattttgttcaatatttacattataaaagaaaataggacggatgtaacggagttttctaaagatatacaaatcaccttctctatgaattgataatagagaaaaagtaccctttatggtagaattttattggagctgatagatatcatgtctctcggcgcattgattcagagtgaaaaaggaaattaacgcatgctaaaaaaattgaaaatgctttatcggctgttaaaattcggaaaaggcttatggagatagcaaacagaaaaaaccgtccttacaaggacggtttttttctgtttccggatcgtccggctgaggttataaaaagcagaccccggggtaaaaaccatgcataagaaacagcggagaacaaaacataactcaataacggcaagtcataaggaggtacgcatgttttcattcatcattcatgtcttcatttcactgtttgcagtctccaatcccatcggaaacgtgccgattttcctttcactgacggaagggtactcggagaaagaacggacagcgatcgcgcgcaaggcttccgtgctgtcgtttatcatcttggcggcttttttaatcttcggccatctgatctttaaactgtttgacattaacattcatgccttacgtatcgcgggcggcatttttattttcggcatcgcttataatcttctgaacgcgaagaaatctcatgtacagtctctccatcatgaagagaaaggggagagcaaggagaaagccgatatatctgtgacgcctttgtcgattccgattatcgccggacccggtacgatcgcgacggtgatgagtctgtcggccggccatggcggcatcttccattacatcagcgtgcttatcggcattgcggccgtcatcgcgatgacgttcatcttctttcactattcatctttcatcagcaataagctcgggaaaaccgaaatgaacgtcattacccgactgatggggctgattttggcggtggtggccatcggcatgatcggcgccggtctgaaaggcatgttcccgatattggtttcctgacttaaaaaagcagcgcccggttatcttcgggtgctgcttttttctattttcggcacatgctgaaacacttcttcactctcaaaaaattctatcaaacggctcagccagtcataataatggagccaatccgtcagttcatccaaaagctgacgggctttttcttcaatatcgggactgagattttccgattccagaagctcagtcagctcgcggttcagctttttatagagcattttgtttttgctgaccgcctttgtccaatttgccgtaaacagggagataaacgtctggtaataatcacgctccacgtcataaaggtctttccgaacgcctttttcaaacactttttcagccagattgacatcggtcatttcgcggaccacctggctcatcctcgttttgctcatcccggtcgcctctgacagctcatttaacgtcatcggcttgcggttcatataaataataccgagcacacgtcccagtgtggccggcattccgaatgtatgcatattctcggcgattctctcaatgagatgctcttcagcatgcccgatgatatcaagagcgtttttttccacggctgatcatcccttcactggcttttcatgctgacaatatatcatattttttacagttgatgaaaaagatgatgcggcaggatatgcgagctatcgggagcgattgtaagaacatccgcattgtcagcgggataacatgaaaaaatacgtatattgtatataatttcaacacattgtaaactttttattttacaaatttcatcttataataaagattatacttttcagaaaaataacggaacccttcggaggtgcacggattgctgagattagaaaatgtatcaaaagtctataaaggcggaaaaaaagctgtcaacagcattgatttaaatatcgaaaaaggcgaatttatttgttttatcgggccgagcggctgcggaaaaacgacgacgatgaaaatgattaacagactgattgagccgtcatccggaaagatttttatcgatggcgaaaacattatggagcaggacccggtggagctgagacggaaaatcggctacgtcattcagcagatcggacttttccctcatatgaccattcagcagaacatttccctcgtgccgaaactgctgaaatggccggaacaaaagcggaaggaacgggcgcgggagcttttgaagctcgtcgatatgggcccggaatatttagaccgctatcctcacgagctgagcgggggacagcagcagagaatcggcgtgctgcgcgcccttgcagcggaaccgcctcttattcttatggatgaaccgttcggagcacttgatccgattacgcgggattcccttcaagaagaattcaaaaaactgcaaagaacattgaataaaacgattgtctttgtaacccacgatatggatgaagccattaagctggctgaccggatcgtcattttaaaagcgggagagatcgttcaggccggcactcctgatgacatcctccggaatccggctaatgagtttgtcgaagaatttatcggcaaagaacggttattgcaatcaagaccggatattgaacgcgtcgagcagatgatgaacaaaaagcctgtcaccgttacggcggacaaaacgctttcgcaggcgatacaggtgatgcgggaacaccgtgtcgattccctgcttgtcgttgatgacctgaatgtgctgcaaggatatgtggatgtggaaatcattgatcagaaccggaaaaaagcgagcctcgtcggcgacgtgctccgctctgatctgtatacggtcgagcaggggacactgctgcgtgataccgtacgcaaaattttaaagcgcggaatgaaatatgtacccgtcgttgatgaacaaaggcatttagtcggaattgtcacgagagcgagccttgtcgacatcgtttacgattcaatctggggtgaggaagaccagctggtgacaggctgacaaggggaggaacgcttacaatgaatgaaatgatcaagtttttgcagacgaacggcggagaactgttatataaaacgtgggagcatttatacatttcgatcatcgccgtcatattaggcattgtcgtcgccgttccgctcggagtggcgcttacgagaatgaaaaagggcgcaggcgccgtcatcggcgccgtcaacattgtgcagaccttgccgagtctcgcgatactggcgttttttatcccgctgttaggcgtgggaaaggtgcccgcgatcgtcgcgctgtttttctattcggtgctgccgattctccggaacacgtataccggcattcaaggcgtaaacaaaaatctgctggaatcgggaaaaggcatcggcatgacggtctgggagcagatcaggcttgtggaactgccgcttgcggttccggtgatcatggcgggcatccgcacatccaccatttatctgatcggctgggcgacgcttgcttcctttatcgggggcggcgggctcggagactatatttttatcggcctgaatctctatcagcctgaatatattatcggcggcgccgtgccggtcaccattttagccattatcattgattatctgctagcggcgacggaacggaaggtgacgccgaaagggctgaaaggactgaaggaagtatcataaggagttggctgttttgaaaagaaaccaaaagagatggatgtgcgcactggcgctgtcagctgctctgcttctaggcggctgttcccttcccggcctgagcggggcttccgatgatacgatcaaaatcggggcgcaaagcatgacggaatcagaaattatcgccaatatgatcgcacagatgattgagcacaatacagacttgaatacggcattaattaaaaacctcggatcgaactatgtccagcagcaagcgatgctcggcggtgaaatcgatatcgccgcgacgcgctactcgggaacggatttaacgagcaccctcggcatggaagcggaaaaagacccgaaaaaagcattatccatcgtacagaaagaatttgagaaacgcttccattacaaatggtttgattcttacggatttgagaacacatacgcttttaccgtcacgaaagagcttgcggaaaaagaccatttagacaaagtgtccgatattaagaagcatgcggatcaatttaagctcggtgtagacaatgcgtggctgaaaagaaaaggtgacggctataaaggctttaccgacacgtacggctttgaattcggcacaacctatccgatgcagatcggacttgtatacgatgccgtgaaaaacgggaaaatggacgccgtcctcgcttattcaacggacggacggatcaaagcgtacgatctaaaaattttaaaagacgacaagcagtttttcccgccgtatgactgttcgccggtcattcccgacagcgtgctgaagcagcatcctgaactgaagggcattgtgaataaactgatcggcaaaatcgatacggaaacgatgcaggaattgaattacgaggtggacggcaagctgaaagaaccgtccgtcgtcgctaaagaatttttggagaaacatcattattttgaataagaaatgaggtggggcaaatggaagtgctgcagcagctcggcacttattattctcaaaacggcgcctatgtgcttcaggagttttaccgccattttctcatgtcggtatacggcgttttatttgcggcgatcgtcggggttccgctcggcatcttcattgccaggcacagaacattaagcggctgggtattcgcggtgacaaacgtgattcagaccgtgccggcgcttgcgatgcttgcggtgctgatgctcgtcatggggctcggcgccaatacggtgatattgtcgctgtttttatattcgcttcttccgatcatccggaatacgtacacgggcatcgccagcattgaacacgcttatcttgaatcgggaaaagcgatgggcatgaccaaatttcaggtgctccgcatggtggagctgccgcttgcgctttccgtcatcatggcggggctgcggacggcgctcgtcatcgcgatcggcattacggcaatcggtacgtttgtcggcgcgggcggactcggtgacattattgtcaggggctcaaacgccacgaacggaaccgcgattattttggccggcgccattccgacagcgctgatggccgttatcgcagatcttgtgatggcatggctggagcgggcgctgagtccggtgagaaagaaaaaacgaaccaaagcgccgaatgcggcatgaaaaaaaacgccttgcgggtcagggcgtttttttcttatggcttcggaacatgcttgaaaatttcttcgctttcaaaaaactcgatcagacggctgatccaattgtagtaatctagccaatcctttaattctttcagcagttcgttgattttttcctcagcttcttccggcacgccgttttcaaggacggctgtcagttcgcggttcagctttttatgcatcattttatttttgctgacgaccttgctccatgtggccgtaaacagcgtaataaaggtttggtaataatcctgctcgacgtcgtataaatctttgcggacgcctttttcaaacactttttccgccagattgacgtcaagcatttcacggaccgcctgactcattctcgtcttgctcatgccggtcgcttctgataattcagttaaggtcatcggcttgcggttcatataaataatgcctaaaatgcgccccaccgtcgcgggcattccgaatgtatgcatattttcagcgattcgttctatcaaatgatcttcagcttgttcgattacgtgtaacggatctttctccaacagtttcaatcctttcagtcagcaattccgatgtcaatataccacatttttaaaccggcggaaatgctcttccgagagaatttggcagtaatccggagcaataagaagaactttgccggtcaatacgggttaatcagtgcttacacaacctttatatataatatggacaaattgtaaactttttaatttacaaagtttaatttataatggaaaacgttcaattgtctgaaaagttaaatttgaatttaacgaattgaataaacttaatcgtggaggtgtgagtgtttgctgacattagaaaatgtctcgaaaatgtataaaggcgggaaaaaagccgtcaacagcatcaacctgaatatcgccaaaggcgaatttatttgttttatcgggccgagcggctgcggcaaaacgacgacgatgaaaatgatcaaccgcttaattgaaccgacagaaggcagaatcctgatagagggccgaaacattatggaacaagacccggtggaactcagaagaagcatcggctatgtcatccagcagatcgggctgtttccgcatatgaccattcagcagaacattacgctcgttccgaagcttttaaagcatcctgccgaaaaacggaaggaacgggcgcgggagcttttaaagctcgttgatatggggcctgaatatttagaccgttaccctcatgaactgagcggaggacagcagcagcgaataggtgtattacgggcacttgccgcagagccgccgctcatcttaatggatgaaccgttcggggcacttgacccgattacgagagattcccttcaggaagaatttaaaaaactgcaaaaaaccttacataaaaccatcgtatttgttacccatgatatggacgaagccatcaagcttgcggacagaatcgtcattctgaaagcgggagaaatcgtccaggccggaacgcctgatgagattctcagatttccggcgaatgaatttgttgaggagtttatcggcaaggaacggctgatccaatcatccagccctgatattgaacgggtggagcagatcatgaatcccgatcccgtgacggtaacacctgagaaaacactgtcagccgccattcagctgatgcgtgccgagcgggtggattcgctgctcgtcattgatgaaaagaacgttctccaaggttatgtcgatgtggagatgattgaccgcaatcgaagacaagcggtaaccgtcgcggaagtgcttgaccgggatctgtacacggtcagaagcggcactctgctccgcgacgccgtccataaaattttaaaaagaggcatgaaatttgtgccggtccttgatgaagccggccggctaacgggaatcgtgacaagggcaagcctcgttgacatcgtctatgactccatctggggagaagagaatcagctcgcggtgatgttatgaggaggcttcaattgatatgaatcagaccgtgcaatttttacaggcaaatggaggagagatgctttataaaacatgggagcatctgtacatctcattaatcgccgtcatggcgggcattctcgccgccgttccgctcggcgtcgtgctgacgaggatgaaaagaggagccggcgccgtcatcggcatcgtcaacatcattcaaaccttgccgagccttgccattcttgcgttttttattccgcttttaggcgtaggaaagatcccggccgttgcggcgctgtttttctattccatgctgccgattctcagaaacacgtatacggggattctcggcgtcaatcggcatcttctggaatcgggaaaaggaatcggcatgacggcatgggagcagatcaggcttgtagaactcccgcttgccgctccggtcatcatggcgggcatcaggacgtcttcgatttatttaatcggctgggcgacgctcgcctcctttatcggcggaggcgggctgggagattacatttttatcggcttgaacctttatcagccggagtatattatcgcaggcgccgttccggtcacagtgctggcggcagccgtcgattacatgctggggatgacagaacggaaagtcacgcctgacgggctgaaaagcataaaggacgcttcataaggaggaggtctctcatggggaatagatgcaaaaaacggctgctcgcaatcgcctgtatcggcatgctgctccttggcggatgctcgctcccgggattgagcgccgcatcggaggacaccattaaaatcggcgcgcaaagcatgaccgaatcagaaatcatcgcgagcatgctcggacagatgatcgaacatcacagcgggttgaagacaacggttattaaaaatctcggctccaatgccgtacagcagcaatccttgataaacggtgatattgatatcgccgcgacgcgctatacaggagacgcgctgacgggcacgcttcgcatggagccggaaaaagacccggacaaagcgctgcggctcgttcagcgtgaatttcaaaacagatatgacatgaaatggtttgattcttacggctttgataatacatacgtctttaccgtttccggacagcttgcccgcaagtatcatttagaatcggtatccgatgtcaaaaaagaagcgtctcatctgaaattcggcgtcgataactactggatgaagctgagaggcaacggatatcaggattttatgaacacatacggaatgtcatttgaaggtacgtatccgatgcagatcggccttgtttacgacgcgctgaaaagcagaaagatggatatcgcgctcgcttattccaccgacggaagaatcatcgcttacggactgaaaacgctgaaggatgataagcggttctttcctccgtatgactgttcacccgtcgttccggatcaagtattaaaagagcatcccgaactggagggcgtgatcaataaaatgatcggcgcgattgatacaaagatgatgcagaaaatgaattacgaagttgacggccgattaaaagagccgtccgtcgtggccaaggaatatttagaaaaacatcattactttgaataacggaaaggagatgtgcggatggacacgatgaaggagctgtttacgtattatgctcaaaacggcagttatgttctgtatgagtgctggcggcactttctcatgtcggcgtacggcgtcgttttcgccgccattttcgccattccggccggaattgtgacagcaaggcacgggcgtctcgccggctgggtgtttgctgtggcgaacgtgattcaaaccgttccggcgcttgcgatgctcgccgtcctgatgctcgtcatgggactcggcgccaatacggtcatcacggctttgtttttgtattcactgctgccgattctcagaaatacgcacacgggcattatcaatatcgagcacgcttatctcgagtcgggaaaagcgatgggcatgacgaaataccaaatccttcgtatggtggagctgccgcttgcgctttccgtcattatggcgggtctccgaacggcgctcgtcattgcgatcggcatcacggcgatcggcaccttcgtcggggcgggcggcctcggcgatatgatcgtcagagggtcgaacgcgacaaacggaaccgccattattttggcgggcgccatcccgaccgcgctgatggcggtagccgcagacctgctgatggcgtggctggaacgagccctcagcccggtgaaaaaacaaaaaagaaagctgatcgtacgctcagcctcatgaaaaaagcattcttccgcgtgaagaatgcttttttttgatttcttgattaaattttgataactgcgctgtaaagtcttacttatcaaataacaaagcagaggggtaatcaaatgagcaacatcatagaaacgagacagctgcaaaaatcattcggcagacaacaggcagtggctgatgtgtctctatcagtaaaacgcaacagtatatacggcctgctcggtccgaacggcgcgggaaaatcaacgacacttaaaatattgaccggcatgctgcagcaaacatccggcgaggttctgttcgacggacatacatggaagcgcgaagatttgaaaagcatcggttccctgattgaagcgccgccgctttacagcaacctgacagccgctgaaaatctgaaagtccgctgcgtgatgctcggactgcctgattcaagaattgcggaagtgctggaaatcacgggattaacgggaaccggaaaaaagcgcgccggacaattttctatgggaatgaagcagcgtctcggcattgcgttagcattattaaaccgtccgtcgctcttaattcttgatgagccgacaaacggattggacccgatgggaattcaggatttgcgggaatttatccgctctctgcccggacagggaatgacggttattttatctagccacctgttatcagaagtcgagcagatcgcagaccatatcggaatcatcagtgacggcgttttaggatatcagggagaaatcagccgggaagacgatctggagcggctgtttctggaggttgtcaaatcaacacgggagaaagcggggactgggaaatgattcagtacatgcaggcggaacatcttacatctaaaagaacatttatcagaaagctgatcattcttatcccgcttctgaacacggctttttcttttctgctgaatgccgcctattttatgacgggcacgttcaattggtgggcggttattttcatgccgctcatgattgctctaatgtgcggtttatctgttaaaaaagagaaaaaatcagcgaatgaccgtgcggtgtactcactgccggctgacttgaagagcatatggttctcaaaaataagcttgatcgcgctgtattcactcctgtcgcaaatcgtctttttagtcatcatgttttttcttggccttgtgtttccggcaattgctgcggttcagctgaaaggtattgaagcaagctcccttctgtggctgtctacgctttgggaaattccgttctgcttatggattgccagacagttcgggtttacggcagtgatcctcatgaatatgatcgccgcctttgttttaggcattgtgccggcgtcaggctcattgtggtggctgagtccatggagctggtcagtccggctgatgtcaccgattctcgggatccatccgaacggaattccgcttcctgcaaacagcggcttattaaacggaaacgtgatcattccggctattattctttctattctttcttttatcgcggtaagttttgtttccgccgtgtctttttcaaaagggggaaaccggtcatgaccgtgcttttacgatatatgtgggccgatgtattaaaaatgaagcgtacgccgctcatatggatgcatgctgcggcgccggttttatgcgcgggatttttcctgttgtatatgtatggaagggttcaggagccttatatgctgtacagtgtgtttttcagcgcgattgccgttttataccctttaatcatcagtattgtctgcggcatgtctgcctcggttgaggaacaggcgggccattttcagatgatgctggcggccccgcattctaaaatcatcagttttgcgggtaagctgcttttgctgctcctattgaatgtgttatcggtaggtctcgccatctgtctttatttggcggggatgaaatttgttcttcacatcaatgatctcccgtatcttctctttttaaaaggaggggcgtggctgattgccggcagtattccgctttatatgatgtctttttttgtcggcataaagtacggcatgggaccgtccgggcttttagggggagcgggtttattaatggcggcgctcatgaatacgggacttggcgataccatctggcgttttttcccgtgggcatggagcgtgcggctttcaggccttgcaggactgctgcattttgacaaagtcaaaaaagagttcctcccttatgtaagatacgatatgagattcggagaaataatgttatatttttctatagtgatattatgtctggccggcctctattggtgcagaagatgggaagggcggcgttcatatgaataaaggcaaggagcgattcggccggtggcaaacattttagcaattgatgatgaaaaagatattctcgttctgatcagaaacattttacagcgtgatcagcatacagtaacgattctggaaaaagcggaggatcagtcattggatttttttcaaggctatgatttgattcttcttgatgtcatgatgcccggaacggacgggattgaactctgccggcggattcggccgctggtggacagcccgatcctgtttttaacggcaaagtctgacgaagaatccattgtgaaaggcctcatgacaggcgctgatgattacatcacaaagccgttcggcgtacaggaattgatggcaagggtaaacgcgcatgtcagaagggaacggcgggaaaagcatcagacgaaacggctgatatcaggcttcatgtttgattttgacaataaagaagtatggattgatgaccggaaactgcctcttacgaaaaacgaatataaaatcgttgaatgtctggcacagcataaaaacagaacattctcacgggagcagatttacgaggaagtgtacggcttggacggcgatgcgctctattcaaccattacggagtttatcagaaccatccggaaaaaatgtaaagaacacggggctgatccgatcaaaacggtgtggggtgtcggatacaaatgggaatagcaaaaggaaaatccagcatccgcaaagagcttgtcaaatttacgatcacactgtgtctgagcacgatgggggtggcggcattatgtgtcgccttaaatgccattgctatgaatgccggagcgatcctgcccgcaaactacagcgagcatgaggcggaacagatcaaaccccgcctgaaatcagcggaaaagataacagaagacatgatccccgcaggtatgacatacgccgtttttgataaaaaaacaaagcggatgacaaaaggaacgatgacggaacaagatgcggccaacgcgagaaaaaagattcagcatcagccgtattttaattatgctcaaaaaggattcatggtgataaatcggaaagatgaatacggcgttctccaatattcactcaggtcggaatttcagtcgccgctgttaaggcgctatctgccgaattatgaatggacgggtcttacgattctgatcactttgcttcttttgaccgtttttattgtgacgacgcgtttcgccaatcagctgagacggcatttcagcacactcagctccattacggcaagcattcaaaaacagaatttaaatatcaatccaaaaaggtcgcgtataaaagaatttgacgatgtcattgactctctgctgaaaatgaaagacgcgcttcaggcatctttggcagcgcagtgggaggcggagcggataaagaaagaacaaatcggcgcgcttgcgcatgatattaaaattccggcaacgattattaaaggaaatgccgagctgcttcagttaacaaagcctgatgaggagcaggcggaatatgcgcagtatattctggatgccggaaacaaaatcgagcattatgtcggacagctgatccagctttctaaagcggaggaggcagttgccgttcatgtggaatataccgacctcaaagagtggattcaaaacatatatcgtgacgcggcggcgcttgcggggccgaaacagattgatctcgtcctcagcgaacggggaattgacagaaaagaagcgccgatcgatcatgagctgctccacagggcggtcatgaatatcgcggcaaatgccgtcgactatacgccggaaggaggggaaatccgtgtggacgtcctgtgcaccgattccgccctccatctcgccgtatccgacagcggaagcgggttctcgccggaagcgctgaaaagagcgacacagcttttttacacggaggataaaagcagacattcggcggggcatcacggcatggggcttacattcgcccatcatgtcgtacatcttcaccacggcgaattaatacttgaaaatcaggagtctggaggagcccgggcggagattcgaattccgctggaaggcgtcagacaaaaacaagccctgcacgcctgagggcttgtttttctgtttaagaaaagcaaaaataaaaacggctgtccgtttgagagatcagccgcttatgcggaaaagagtttatcaggaaggatcaatccatgttgaagaccacttggaaatttcctctaaaataggggctaatgcgcagcctttttccgttaaagaatactcaatgcggacaggcgtttcggggataacatcccgtttgatgacaccttctgtttcaagttctttcagacgttctgacaagactcttccgcttaaattcggaagcgccgcttcaatttcgctaaatcgctgctgtccgttcaataactgaaagacgattagagccacccagcgtttacttaggatgtcgaccgctttttcgaatctggggcacatttctgattggttcatgctttttcacctcgtcttctgctattataccgcaaaatcggagggaacgtacgtctggcgcttgttaagttgaggagaggatcaaaaagaggatgaggaatccggggagcgctttttcgcttcagccgcgataaaatcaaagtatttgctgacgctttcaatatcttcttttgtgaagtgctgccactttttgctgtcaaacagcggcagatgctccgcgcctctgtcaacggcggtctgatagatggcgcagatggattgatagctttcggaggtttcgcggatttcttcctgaaatgccttgatgtgtccggcccgcgccattaactcctcgtacggaatttttaatgtgtccgccaattttcggatggtcgcgggtttaggaatgccgcggtgcccgttttcaattctggaaatggtcgccgagctgacgccggaatagacggcaagctgattgacggtaagcttccgggcgcggcgcagctctcttaattgctttccgaatgtgttcaataagatcgcctcacatgtgcaaagtcatgagtcttcatttgttctttttttggcttcagccgataagaacgcaaagtatttatcaagcagaaccaagtcttctttcgacaggtgccgccagttctcccgctccaatagggataaatcatgcagctcatacgtttcggctttttccagcaaggtgcagcccgtgtcgtacggggctctcgtttcctggacggtctctatgtatcccgccgtctgcatcagttcctcatacgggatttttaacgcatctgcgagctttttaatggttgcaggtttcggcaccccgcgtttgccgttttcaatccgcgagattcccgcggcgctcacgcctgaatacgttgccagctgattcactgtcagatgccttttttcccgcaatgtccgcaattgtttcccgaagctttccacagtctctccccctcccgcggtctatttatattctagtatgtttattgactaaagggaatagccaggctggaaaagtattgacaaaagttaacaaaagccgtatcttatgtataagaaagaaagtatttgacagaacggaaggtgaagaaagtggtcgaaaagatacagatcagaagagattatgtgctgcagtatatggtcaataatgactactcgttaaaccagctcgccctggagatcggaatatctcccgccacactgagccgtgtactgaatggagagcggaggccgggccagctggtcatcggaaaaatgctctattactttgacatgaaatttgaagatcttttttactacgactttgttgacaaaagtcaatgatgatggaagattcaaacgcatttccgtttttctgacatgatgtgcaccgatacggcgtgacatgcctttgtttttcatgtaaaatagaagcaatgtaggccagtcagtctggaggtgtatgggatgcacacattattgattaccttattggtcatcgtcagtattgcacttattattgtcgtattgcttcaaaccagcaaaagcgccggtttatcgggtgcaatttcaggcggggcggagcagcttttcggaaaacagaaagcaaggggccttgatctgattcttcaccgcacaaccgttgtgctggcagtcttgtttttcgtgttgacgatttcgctggcgtatatcgtataaggcaatgtttgtataaggtctgatttaatatcaggcctttttcttgttgagagacggcgtttgtttctcgcaaaactgtggaaaactaaattgaatgtgcaaaaaaggggttatgagcatgaaaattgtgacaccaaaaccatttacatttaaaggcggagacaaagcggtgcttctgctgcacggatttacgggaaatacggcagacgtcagaatgctcggccgctacttgaatgagcgcggctacacttgtcacgcgcctcaatataaagggcacggcgttccgccggaagaactggtacatacggagcctgaagattggtggaaagacgtcatggacggttatgaatatttacggtctgaaggctatgaaaacattgcggcctgcggactgtcgcttggcggggttttttcattgaaattgggttacactgtacccataaagggaattgttcctatgtgtgcgccgatgcacattaaaagtgaagaggttatgtacgaaggagttctctcctacgcgcgcaattataaaaaattcgaaggaaaacagccggagcagattgaaaaggaaatgaaggagtttgaaaaaacaccgatgaatacgctcaaatcgcttcaggagctgattgccgatgtgcgcaaaaacgtcgacatgatctattccccgacatttgtggttcaggcacggcatgaccatatgattaatacagaaagtgcgaacatcatttacaacgaggtggaaacggacgacaaacagctgaaatggtatgaagaatcaggtcatgtcattacgctcgataaagaacgggacctcgttcatcaggatgtgtacgaatttttagagaaactcgattggtaacaaacaggaggtcgaataatggaaaaagaagcgtttatggaccgtcttctcgcgtttatgaaggaagaggcgtacaagccccttaccgttcaggaactcgaggagatgctgaacatcacggaagcagatgaatttaaagagctggtaaaagcgctggtggcgctcgaggagacgggacagatcgtccgcaccagaagcaaccgctacgggcttccggaaaaaatgaatttagtaaaaggtaaaatttccgcgcatgcgaaaggattcgcgtttctattgccggaggatacctctttaagcgacgtgtttattccgccgaatgagctgaatacggccatgaacggcgatatcgtcatggtgcggctcaattcccagtcaagcggatcaagacaggaaggcacggtcatccgcatcttggaaagaagcatcgaccgtgtcgtgggcacatacacagaaacgaaaagcttcggctttgtcatcccggatgataagaaaatcacgagtgatatttttattccgaaacatgccaataacggcgctgcggaaggtcataaagtcgtcgtcaaactgacaagctaccctgaaggcagaatgaacgccgaaggagaaatcattgaaatactcggccataaaaatgatcccggcatcgatattttatcaatcatccataagcacggcctgccgggagattttccggctgaagtgatggagcaggcaacaagcacgcccgataccatcgatgaaaaagacatcaaagaccgccgtgatctccgcgatcaggtcattgtcaccattgacggcgcggatgcgaaggatctggatgacgccgtcactgtaacaaagcttgataacggcagctacaagctcggcgttcatattgccgacgtcagccattacgtcacggagaattccccgattgacaaagaagcgctggatagagggacaagcgtgtacttggttgaccgggtcattccgatgattccgcacagactgtctaacggaatctgttctttaaatccgaaggtcgaccggctgacgctttcctgcgaaatgacaatcaaccagcagggccaggtgacagagcacgagatcttccaaagcgtcattaaaacgacggaaagaatgacctattcagatgtcaaccggatcctcacagaagacgacgccgagctgaaagaaagatatgagccgctcgtcccgatgtttaaagacatggaacgtctggcggaaattctccgggcgaaacggatggaccgcggcgccgtggattttgatttcaaagaggcgaaagtgctcgtcgatgaggaaggcgccgttaaagacgtcgtcatcagagagcgctcagtagcggaaaagctgattgaagaattcatgcttgtggcaaacgaaacggtggccgagcacttccattggatgaacgtgccgtttatttaccggattcacgaagagccgaacgccgaaaaactgcaaaagttcttggagttcgtcacgacattcggttatatcgtcaaaggaaaagccggagacattcatccgcgcgcgctgcaaagcattcttgacgaagtgcgggaccgtccggaagaaacggtgatttcaaccgtcatgctccgttccatgaagcaggcgaaatacgacccgcaaagcctgggccatttcgggctggcgactgaattttatacgcacttcacatcgccgatccgccgttatcctgacttaatcgttcacaggctgatcagaacgtatttgatcaacggacaatcggacgaagcgactcaagaaaagtgggccgaacgccttccggaaatcgctgaccatacgtcaacgatggaacggcgcgccgttgatgcagagcgggaaacggacgatctgaaaaaagcggaatatatgcttgataaaatcggcgaggaatttgacggcatgatcagttccgtcacgaatttcggaatgtttgtcgagctgccgaatacgattgaaggtcttgtgcacgtcagctttatgacggatgattattaccgttttgacgagcagcatttcgccatgatcggcgaacgcacgggcaacgtttaccggatcggagacgaaatcacggtcaaagtcgtcgacgtcaataaagatgagagaaacatcgactttgaaattgtcggcatgaaaggcacccgccgtccgagagaaacgacaggcgaccgcagaaaacgcggcagaccggcgcggaaacgcgtgttaaacagcaataccccggcttcaccgccgaaatcggaggaaaaaggggaatggtttacaaaaccgaagaagaaaaagaaaaaacgcggtttccaaaacgcgccgaaacaaaaacgcaaaaagaagaagtaaatgcgaaaagcaaatggggcaaaatgctctgtttgctttctttcgcaagccgcattttcattgtcgcggaacgctccatttgctaaaataaagcgtatcgcacacatgaacggtttttgcggagagaggaggataaggcatgccaaaaggatcaggcaaagtattatcgcaaaacaaaaaagcaaaccatgattactttatagaagaaacctatgaaacaggcatcgtgctgcagggaacagagattaagtccatccgcgccggccgcgtaaacatgaaggattcctttgcgaaaatcgagcgcggcgaagtgttcctccacaacatgcacatcagcccgtacgagcagggaaaccgctataaccacgacccgctccggacgagaaagcttttgatgcacaggaaagaaatcaataagctgatcggcctgacaaaagagaaaggctattccctcgtgccgctgaagctgtatttgaaaaacggctttgccaaagtgctaatcggcctcggaaaagggaagaaaacatacgataaacgtgaagatttaaaacgaaaagacgccaaaagagaaatcgaaagagcgttcagagacagacaaaaaggcttctaatgcctgagccttgatgtgataactgccgtatgctatactgttcacacatcaaattcacaggctgtttattgaagacattcccaattgaatttgtctgtgatcatgatataataacagtacagccagttaagcaagagcttgatagatctcccgtatacccttaacaaggggacgttacggattcgacagggatggatcgagcttgagctgcgagccgagaggcgatctcgttaacacgcacctaaatataactggcaaaactaaaagttttaaccaaaacttagcactagctgcctaataaacgcagcgagctcttcctgacattgcctatgtgtccgtgaagagcacatccaagtaggctacgcttgcgttcccgtctgagaacgtaagaagagactgacagactagctctcggaaggcccgcccgcaggcacgaagacgagtgaaacacgaaatatgcaggctacgctcgtagacgcttaagtaatcgatgtttctggacgtgggttcgactcccaccgtctccatacataacagaggaaccgcagtgccgtcacttgaccgcactgcggttttttcatgccgaaataaaggagtccatttgaatgatagtcgtcattatagacggaaaagatattacaagcacagaagcattacaccgaatcttaaaagatcaattagatttcccggacttttatggcgaaaatctgaatgccttatgggattgtctgacaggctggatcgaatatccgctgactttggtgtggaagaattttgaggccagtcaaaaggcattgggttcggatgctgatgatgtattaaggatattataaaaggcgcaggcagagttagatggtgaatttttcattcaaattgagcagccgtcagccgggacaacggacaggcactaaaaagtgcgtacttcccctcatctatttttctatccgataatagggacggaaggtttcaggctttcgatttcagtccatatataagaagagacttgcgatagggaggaatggatgatggatttgcagttgaaagggaagacggcgcttgtgacgggatctacgtcaggcatcgggaaggcgattgcggcttcgctgattgcagaaggtgcggctgtgatcattaacggacgccgtgaagaaaaggtgaacgaaacgatccgggaactagagaaacagacgccggatgcccgtctctatccggccgcatttgatttaggcacggcggaaggatgcggcgcgatttttcagcagtatccggatgtggatattctcgtcaacaatttaggaatctttgaacctgcggaatactttgatattcctgacgaagagtggctccggtttttcgaggtgaatatcatgagcggcgtgaggctgacacgccggtatgcaaagcggatgattgaacggaaggaagggcgggtgatttttatcgcgagtgaagcggccgtcatgccttctcaggaaatggcccattacagcgctacgaaaacaacgcagctgtcgctgtcacgcagcctggccgaactcacggaagggacgaatgtgacggtgaatacggtcatgccgggctccacgaaaacagagggcgtcgaaacgatgctggagtcgctttatcccggtgaaaacctgacagcggctgaagcggagagacgatttatgaaggagaatcgtccgacgtcgatcattcagcggttgatccgtccggaagaaatcgctcactttgtcgcctttttaagcagcccgctgtcgtctgccattaacggatctgcattgcggatcgacggcggcttggtgcggagcattatataagatgaacgtacaaaaacccccgtaaagcgggggtttttttaatgcggatcacgctgaaaccggccgatgatcctgctgattaaatcttttgtggcagagtcaaaatgctcttctttctggtttgtcaacagcccgaccggcggtgaaattgttaagttacggatcggaatgaccttcgtgccctcgatcggttctgagtgcgccgtcgccgtaaagattgagacgccgatattttccctgacatagtattggtgagccatgctgctggtcagctccatttttcgatagcggctgccgatggcccgctgcaggtgctgttcaatttgaatccggatcgggcaattggcgggcgtgaaaatcaggcattcattttctaaatcctcgagattgacgcttgctttggcggcaaggggatgtctgtctgacacgatgacattgagcgagtcatgaaaaaacggatcgaaataattctccagaatcagctccggctcgccgcatacggcaaaatcaatggcgccctccagcagtttgcggctgcatgtattggcatcatccacgctgacattgaccgacatgtcaggataatcatttaagaacccccgcagtacggcagggaagatcaggcttgccgtcggttcggatatgccgatgtgaataaggccggcctggccctgtctgatgtcggccagagtatggtcaagcacctcgtattgcgcgagaagctgcccggcccgctcatgaaacagccgccccgcccttgtcagcttcagcttctttccccgttcaaacagctgagcgcccacatcctgttccagctgtttaatccgcattgaaatcgtcggctgtgagtagttcagaatttcggcggctttataaaagctgcctgactgtacgatcgtatgaaacgttttaatggtgcgtaattccaacgaaatcccctcccggctgttcattaattttcttgaacctttcctttactttttttgattagtcaaataaatcagtttgctttatagtataaacaatcaaagcttagtaaacaaattggaattatatatttttgcggggagagtgaccggaatgagtgaagacatatttcgattggctgagaaaaaggatgcaccggagtttttagagctgctgtacagcgcgtttcagccgatccgcaatttggagattgactggccgtcggcgcgggccgacatcgatatggtaacagaaaatattgaaaatcattcagccgtcgtgctcgaacgggacggacggattctttcaaccattacgatccgttttccgtgggagagtgacacgcctccgtcaaaatatccgtttgtctggtggtttgcaacgcttcctgagctgaaggggcagggcatcggcagcaaacttttgacttatgtggaggaacacgtgctgcgggatacgctgaaggccccggccatcacgctcggcacttcggcgcgcaagcatccctggcttgtagatatgtacagacggagggggtatgaagtgtattttgagcaggagaaagacggagacatcggagtcatgatgagaaaggtgctcataccggagcggtttgacgcgtcgctgttaggcacaccgagctgggcgcaatgataaaaaaacggatcagagccggctgtctgcttctgctgctcggtgtgctggccgggtgcgggcaaggagaaagcacaaaagcggggagcggcgtgcagaccgtcattgtcggcacgggaactgattttccgaacattgcttttatggatgaaaaaggcgagctgaccggctatgacattgaagtgataaaagccattgataaacagctgccgcaatacaaatttgtctttaagacgatggatttttcgaatctgcttacaagtctcggaaaccggaaaattgacgtgatcgcgcacaatatggcgaaaaataaggaacgggagaaacgctttttgtatcacaagatcccgtataactactcgccgatgtacatcacggtgaaggcggataatgacgcgatacacacgctccgggatttaaaagggaaaaccgtcatcgtcggcgcgacgtcaaacgcggcggattatatgacggcatacaacaaaacccacggcagcccgatacatttgaaatacgccgggcagggcagcaatgatacagcaaaccaaatggagacgggacgcgctgacgccaccgtatccacgccgtttgccgtcgattttcaaaataagacgcacgcgttcaaacaaaaaacggtcggtgatgtgctgctggataccgaggtgtattttatgttcaataaaaacagccaaaccctggcggacgatacggatcgggcgattcaaaagcttgagaaggacggcacattgaaaagactgagtgaaaaatggctcggcgcggattattcaaaatcaagtttcacgaaataattgaagcagaaaacggggcgatcacatgaaaataagattggcggtcatgtcattaacaattgccgcaacggcggcgttatcagcctgcggcgcgggagggggggcggcatcaggcaatcagaaaaacgtgaagaacattacggtcggcacgggaactcaatttccgaatatttgctttattgatgataaaggcaaattgacgggctacgacgttgagctggtgaaagagcttgataggcgcctgccggactatcgtttcacttttaaaacgatggatttctccaacctgcttgtcagcctcggccagcataaagtcgatatcgtagcccatcaaatggagaaaagcgccgaacgggagaaaaaatttctgttcaatcaagtcgcgtataacaacttcccgctgaaaatcacggtgcttcaagaaaacgggaacattcacggcattgatgacttgaaaggaaagcgggtcattacaagtccgacgtcaaacggcgcgcttgtgctgaaaaaatggaatgaaaaacacggcagtccgtttgaaattgcttatgccggccaaggctccaacgatgcggccaatcagctgaaatccggccgcgccgatgcgacgatttctacgccgtttgccgtcgatttccaaaacaaaacgagcgcgatcaaagaaaaaacagtcggcggggtgctgtcaaatgccaaagtgttctttatgtttaacaaaaatgaacaaacgctgagtgatgacattgataaagccctgcaggaaatcattgatgacggcacgcttaaaaagctgagtgaaaagtggctcggcgcggattattcaaaggagcaatattaagtgaaaaagagagggatcggcaatggaaaaagcgtttgatatcagtatgatcgcgtcctttgtgccgacattgctcgggtatttgcccgtcacgctgtatatattggcggtgtctctgctgttcggctttctattggggctgcttttggcgctgccccgcatctatcgcattcccgttttgaatcagtttgcgaagctgtatatctcttttttcagaggaacgcccatcatggtgcagctgtttattgtgttttacggtattccggcgctcacggcgctcgccggaattgatacctccaaaatggaccctttgtatgcggccatcgccacgtacgcgctgagcagcgcggcaagagcggccgaaatcatcaggggaggtgtgaacagcgtcgaccgcgggcaggcggaggctgctttcagcatcgggctgaacggggggcagacattccggcgcatcattctgccgcaggcgcttgtgcaggcctttcccaacatcggaaatatggtgatcggtttcttaaaagatacatcactcgctttttcgatcggggtgatggatatgtcgggcagaggacagaccttgattacatcgagcaatcattctttagaagtgtatatctcgctttctgttctgtattatgcggccgcccttttatttgaatgtgtcttcagatgggccgaaaaacgaatcaagaaagatgagacgcgccttgtaacggtttttgacatgagcgcgcacggctgaaaaggagggagaacagtggagctggatattccatttatcggcactgcgatcaaacaaatgatgaaaaccgttccgcttacattggcaatgacggtcattccgattattgccggatttttcatagctctcggcaatatcacggtgcgtatattccgcatcaaatggctgctggcctgctcatcgttttacgtgtcttttttccgcagcaccccggcgattctccatattatgctgatttatttaggggttccgctgattgccgatcaattcagccgcgcgtttcatctcggctggtcggccaatcagattccggtcgccgtgtttgtcatcatggcactgtcattaacggcaggcgcttatatgacggaaattctccgttccgggatcatggccgtcgatacggggcaggcggaggcggcatattcaatcggcttgacgcggggccagatgattcggcgcgtggttctgccgcaggcgttcatgatatcgctgccgaacttcaccaacataggcatcggctttttgcataccacttccatcgcggcaattgttgcggtgcctgaaattacaggaacggcgacgattgcggcatccgataactatgcatttctggaagcatttatcggggctgccgtgatttattggggattaacgctgattctcgaagctgtaaacagtctggcggaaaaaagggcggccagatatcaaggaggcgcattatgatcgaaatccgaaacattcagaaacattttggcagtcatcacgtgctaaaggggatcaatttaagtgtccggaaaggagaagtcgtgaccatcatcggcccgagcggttccgggaaaaccacttttctgcgctgccttaatttacttgagcggccggatgagggcgccatttcgctgcacggtgaagtcattaactgcaaaaagcctgccaaaaaagacattctcagactgaggaaacagacggcgatggtttttcagcaatatcatttgttttcgcataaaacggcgattcaaaatgttatggaaggcctgacggtcgcaaggaaaatgaaaaaaacagatgcgtacgccattgccgagcgggaactggccaaggtggggcttcaggataaattgaacgcctatccgaatcagctgtcgggaggccaaaagcagcgggtcggaattgccagggcgcttgccattcatcctgatgtgatgctgtttgatgaaccgaccgcagcccttgatccggagcttgtcggcgaggtgctcgaggtgatgcttaacattgtgcggaccggcgccaccatgatcattgtcacacatgaaatggaattcgccagaagagtgtccgaccgaattgtgtttatggatgaaggagcaatcgtggaacaaggaacgcctgaggaagtcttttacaagacgaaaaaagaaagaacgaagaagttcctccgccgcgtgctgcctgattacggttatgacataaaagagcgcataaaggagcctgtcgtatgattcgtttaagcattttagaccaaagtgtcaccgcggaaaaccaaaccgcagaagaagccttgcggcaaacggtgagattggctcaggaggccgaacaatacggatatgaccgtttctgggcggcggagcatcataacaatgaagagatagcgggatcagcgccggaaattgttctggggtatcttgccgcaagcacgaaaaaaatccgtctcgcgtccggcggggtgatgctgcagcattacagtccttataaagtggcagagcagttccgggttctgtccgctcttgctcccggccgtgtggcgcttggtgtcggcaaagcgcccggcggatttcagctgtcaaccgatgcgctgcagcgggagcttatccagcccgcccgtttatttgaagaaaagcttgaggagctgactcatttcatccgaaatgattttccggactcgcaccgctacgcgtcattgcggccggcgccgcatactgagtatgcgcctgacctctttttgctcggcggcagcgcggaaagcgcgatatccgcggccaaactcggcatttccttcgttttcgcctatttcataaacggtgaagaggctgcgttagaaaaagcgcgccacgcctttgacgagcatctgccgaaagggtctaaggcggaatttcaccttgcgccgatggtctttaccgcgcatacaaaagcagaagcggaaaaacacgtggtatcgcgtgagtcggtcaaaatcattctcgaagacggcaaaaaggtgaatgtcggttcccgggaacaagcggaagcgtttcttgaacaagtcacgcagccatacaagctgattacacaaaagacgggtgtgattgccgggacaaaagaagagactgccgccgagctgcgacgattatccgttccgtacagcattactgattttgtgattttgtcgcctatcaaaaacgctgaggaaaaacgattgtcttaccggctgttaagcgaagcggtgcagccggccccacaattataggagggatgaacatgagtcatgaagtaaacgtagtggtctggagcaaacagggctgctcctattgcgatgaagtgaaaggatatttgcgggaaaatgccgttgcatacgaaacaattgatgtgacagagcgggacgaattgagtgacgtgctgcagacgaagtacggcatccgtcatgttcccgtcgttgaaatcggcagcggtgacagccgtgtgtatcaggccgttactcaagtcggcattgaacatgtagaacgggcgcttgctgattacgaggggaaaaagggggagagaaaatgagccggacagatcttattcaattcggagccatgattcacggtgtcggcggcacaacggacggctggcgtcatcccgacgccgatccgacagcaagcacgaatgcggcgttttacaggcaaaaagcgcagactgctgaaagagggctgttcagctttgcttttattgcggacggcttgttcatttctgaaaagtccatcccgcatttcttaaatcggtttgagccgatcactatcttatcggcgcttgccgcctctacaacccatcttggtttaatcggcacattttccacatcgttcactgagccgttcaccatcgcaagacagctgatgtctcttgaccatatcagcggcggccgggcgggctggaatctcgtcacctctccgcaggcgggagccgcgcgcaatcacagcaaagaaagccttcccgaccacagccggcgctatgccatcgcccaggaacatgtggacgtggtgcgcggtctgtggaattcctgggaagaagatgccttcgtccgcaacaaagaaaccgggcagttttttgaccctgacaaactgcatcgcctgtatcacaaaggcgagtattttcaagtggagggcccgctgaatatcggccggtccaaacagggagagccggtcgttttccaagcggggtcttcagaaaccggccggtcgtttgccgcgaggaatgcagatgcagtctttacgcactccaattcacttgaggaaacgaaagctttttatgatgatgtgaagaagcgggcggcggattacggccgggacgctaccaagctgcggatctttccgggaatcagtccgattatagccggctcacaagaagaagcggaagcgaaataccaagaattcgccgagctgattccgatagagaacgccgttaaatatgtggccagattttttgacgattatgatctgagccgttttccgctggatgagccgtttcctgatttgggcgacgtcgggaaaaacgcgtttcaaagcacgacagaccgtatcaaaagggaggcgaaagcccggaatcttacgctgcgtcaagtggcgcgcgaagccgcgtttccgcgaacccattttatcggcacaccggaacatgtggcatcattaattgaaacatggtttcagcgggaagcggcggacgggtttatcattcactctgacatccccggcatgcttgaagcttttgtggatcatgtcataccgatcctccaggaaaaggggctgtaccgaaaaagctatccggcggatacactgcgggggaatctcgggttggatattccggtctgtaaatcaaatccgatgttgagcagaaactaaatgtttctgctttttctgctgcttgccattcccgtcattacagccttttcaaaaaaatacactgatttcgagatattattgttgcgaaaagatttttttgtaactataattattacagaactgatcagtataaaaaaacattcatatttcataataaatgtgtgtgtaatctgaaaacgaaagggctgtttacaatggcaaaagtactttatatcactgctcatcctcatgatgaaaagacatcttacagcatggcgacaggaaaagcgtttatcgattcttataaagaatcaaacccgaatgatgaggttgtacatatcgacctttacaaagagaacattcctcatatcgatgcggatgtattcagcggctggggaaaacttcaatccggcacaggttttgaagagctttctgaaaacgaaaaagcgaaagtcggccgtctgaacgagctgagcgatcaattcgcgtcagctgacaaatacgtattcgtcacaccactttggaacttctcattcccgcctgttatgaaagcgtaccttgattctgtggctgtagccggaaaatcattcaaatatacagagcaaggcccgatcggtctgttgacagacaaaaaagcgctccatattcaggcgcgcggaggctattactctgaaggaccggcggctgatatggaaatgggccaccgttacatcggcatcatgatgaacttcttcggcgttccttcttttgacggattaatcgttgaaggccataatgctgaaccgaataaagcacagcaaattaaagaagatgcgattgcccgcgcgaaagaagccggaaaatcattctgatcttaaaaaaacctccccgccgtacggctgggaggtttttcatattaaagggcaatcgtccgtttttgttcgctgcttttcatcgccgcttcaatgacacggatgacatcgatgccttcttttgccgtaacgggaagcggttttccgtttaagatgctgtctgccagcagtttgtagtacgtaaggtaagagccgttctcagaggggattgtttctgtatgccgtttttcatccgctgcgattgtcagttctccgaagttgtcagggtcatcggcgccccagctctcgtcaatcggcttttgtccggctgaaagcgcatcttcctgtccatccattccgtatttgataaagcttgcattccgtccgtgaatctgatagcgcgggccgcttgccgcattcatggagccggattgaagaatgacctgaagtttgccgtaatggagcgcggccagaaaattatcaacggtttcactgttgtcccgctgtttcatcacatgtgcggtgacggattccggcattccgaaaagcagaagtgtctggtcaataatatgtgaaccgagatcatacagcgttcccgtggcgggtccgttcatttcgcgccatttttcctgtacaaccgggttgtatagatcgtagctgacttgatatgtatgaatgtcttgaagcgccccgtcccgaatcagcttttgtatcgttaaaaagtcattgtcccagcgccggttgtgatacacgctcagcaagacgcctttattttcagccgttcttctcagctcctccgcttctgctgaagtcgccgtcatcggtttttccacgacggtgtgttttcccgccaggagacatttcatcgctgattcataatgcattccgctcggtgtcgtgacgatgacgagatcaatgtcaggatcaccggtaatgtcttcaatcgcgcgcacggcttcagcccccggcagatcacgtttgacctcatccgttctggacgtcatgacttttttgatctgataatcatcaaggacgtccaaaagcggcgcatgaaagactttacccgacaaaccatatcccaatatgccaacttgtatcgttttcaatgaatttccccctcttgatatgtgataacattatataccccgcgggtgtactggtaaaacttgtgtgttgaaaattttttacaccggattttcaagtctgtataatgaagataacgaagaaaaaaaccgaggtggaaaatggacaaacataccgagcatcaatcgttaaatcataaaagcgccaaagaaaaagaccagatcctgaaccggctgaaacggattgaaggccaagtcaggggcattcagaatatggtggataacgaacgatactgcgtggatattctcgtacagatttcagccgtacaggcggccatgcagaaagtcgcgtttcatctgctggaagatcacgcccatcactgcgtagccggcgccattgagagcggaaacggggagcaggcgattgccgagcttcttgatgttgtgaaaaaaatcgcaaaatcgtaaaataaaatgttttgaaataccctacaggggtatggtaacatgaagaagaaaaaacaagacgtggagggaatcatcatggaacaaaaaacactgcaagtcgaaggcatgtcctgtcagcactgcgtcaaagcagtagagaccggagtaggagaactgaacggagtgacggcggttcaggtgaaattggaagccggacaggtggatgtgacgtttgatgagaacaaagtctccgtatcagatataaaagacgcgattgaagatcaaggttatgacgtcgtataggatttatcgcgctgcggaaacgggcgcggttttcttttatcatacttatacccccatggggtttatgaagagagatgaggacattgagtgaaccgaaagaaatgaccattcaagtggggggcatgacatgcgccgcctgcgcttctagaattgaaaaaggactgaaacggatggacggcgtcaatgacgcttccgtcaatcttgcgcttgagacctcaaatatttcctatcagcctgacaaaatcgaagctggcgccataaaggataaaattgaaaaactcggctaccatgttgtgacggaaaaagccgagtttcagattgaaggcatgacgtgcgccgcttgcgccaatcggattgaaaagcgcctgaacaaaacagagggcgttgtgggcgcgccggtgaatttcgcccttgaaacggtcaccgttgaatacaatccgaaagaggtgacaccgaaagagctgaaagagaccgtggcaaaactcggctacagattagacgagaagcaagcggttgatggaggcggcggattatcccaaaaggagaaagagcagcgaaaacagctgatcaggctgatattttctgccgttctctcatttccgcttctatggtcgatggtcagccatttttcttttacttcttttatctggatgccggatatcctgatgaatccgtggctgcaattcgcgcttgccaccccggtgcagctcgtcatcggctggcctttttatatgggagcgtataaggcgctgagaaacaaaagcgccaatatggatgttctcgttgcgctcggaacgacggccgcttacgcatacagcctgtacatgacgattgcgtctctcggacgagacggacatgtagaggggctttattatgaaacgagcgccattttgctgactttgattttgcttggaaagcttttagagatgaaagcgaaaggccgctcatcagaagcgattaaaaagttaatgaagcttcaggcgaagacggcggcggttgagcgggaagggaaggtacaggtgattccgattgacgaggtccggacgggggatatcgtatatgtgaaaccgggagaacgtgttcctgtcgatggcgaagtgattgaaggccattccgcaattgatgaatcgatgattacgggggagagcatgcctgtcgataagtctcccggaagcaccgtcaccggggcgacgatcaatgcaaacggctttctcaaaatcagagcggtgaatgtcgggaaagataccgcgcttgcacacattattaaaatcgtggaagaagcccaaggatcaaaagcccccattcagcggctcgcagatcacatttcaggcattttcgtcccgattgtgctggggctggccgtgctgacttttctcatttggtatgtatgggcggcgccgggacagttttctgaagcgatcggcaaattcatcgccgtgcttgtcattgcctgtccgtgcgcactcgggctcgccactccgacgagcattatggcgggctccggccgcgcagctgaattcggcattctttttaaaggcggagagcatttagaaaaaacacagcgtctgacgaccatcgtactggataaaacaggaacggtgacaaacggcagaccggttctgacagatgccgtaccggcagagggaatgaacgaagaggaactcctgcggctggcggcggccgccgaaacgggatcagagcacccgcttggagaagccatcgtgtcaggagccgaaaaacgggggattgccatcccaaaaatcacccggttccaagcccggatcggttcgggaatatacgccgaggctgacggcagaacgattcttgccggatcaagacggctgatggaatcagaacacatcgaacatgaggcgctgcttcctcacatggcccgcttggaggcggaaggaaaaacggtgatgcttattgcggcagacggcaaagcggcggggcttatcgcagtcgccgatacaatcaaagacacatctccggccgcggtgaaacgcctgaatgatatggggcttgacgtcatcatgatgaccggtgacaacaaaaagaccgcggaagccattgcaaaagccgcgggcatcggcagcgtgatcgccgaagtgcttcccgaacaaaaggcggcggaaatttcccggctgcaaaaagaaggccggcgcgtggcgatggtcggtgacggcatcaatgatgctccggcgctggctgtggccgatatcggaatggccatcggcaccggcacagatatcgcaatggaagcggcggatattacgctgatccgcggtgacctgaacggcattgccgacgccatcggcatgagcaggctgaccatgagaaacatcaagcagaatttaggctgggcattgggatacaacagcatcggcattccgattgcggcggccggctttctggccccgtgggtggcaggcgctgccatggcgttcagctcagtatcggtcgtccttaatgctttgcgtttacagaaggtaaaaaaagacaaaatgggctgatgcctgttttgtcttttttattgacactttattcaaagcctgcatataatagagaaaacaaatatatgagtatatgttcatatatataaattcgtttagctgtattgatgttatgggaatcctattacggaaagtagggtgagtcgaaaatgaaagcagccaaaggtgaatttgtattagacggacttgattgcagcaactgtgcaaaaaaaatagaaaacggcgtaaaagccattgacggcatagacggctgtgctgtcaattttgcggcaagcaccatcacggtctcagccggcggcaaaaacgagcaatggatgaaagatgaggttgcgaaaaaagtaaagtccattgatcctcatgtgaccgttcgttcgaagcacgaagacaaacccggcgaggatgaataccgcaaaaagctgcagctgatgttagtgaggttggctgcgggagccgttttggccgtcatcgcttacttcgcgcacacgggcgccgtccttgagtttctgctcttttttgcttcgtatttgatcatcggcggcgatatcgtagccagagcgggaaaaaacattgtccgcggccaggtatttgatgagcattttctgatggcgcttgccacgatcggcgcatttatgattcatcaatatccggaaggcgtcgcggtcatgctgttctaccaaatcggtgaactgtttcagggagcggccgtcagccgatccagaaaatcgatcagcgcgttattggacatccgtcctgagtacgccaatgtgaaaacggaaaacggcatgactgccgttccgccgcaggacgtcaaagtcggacaggtcatcgtcgtgaatcccggagaacggattccgttggacggaaaggtgctgagcggttcttcgatggttgatacatccgctttaacgggcgaatccgtgccaagaaaagcggagccggggcaagatgtgatggccggatttatgaatcagaacggcgtgcttcatattgaaacctctaaaggatatgaagactctgccgtgtcaaaaatattggatctggtcgaaaatgcggccggacgcaaagcgaaaacggaaaactttattacgaagtttgccaagtattatacaccggccgttgtcattgttgcggtgcttctcgcctttttaccgccgcttctcgtgccttcagccgcgctatccgactgggtgtaccgcgcgctgattttccttgtgatttcttgtccgtgcgcactcgtcgtctccattccgctcgggtttttcggcggtatcggagctgcgtctaaagcaggggtgctcgtgaaaggcagcaactatttagaagcgctcaatcaggtggcatacgccgtgtttgataaaacgggaaccttaacgaaagggaatttcgccgttactgatatcaaaccggcggcagggtttacgaaagacagcctgcttcatgcggccgcgcttgcagaagcccattccaatcatccgattgcttcttccatccgtgaagcttacaatcaaccgctctcggctgaggagattgaagaatatgaagaaatacccggacacggcattcgggtgaaaaccggcggatcaacgattttagccggaaatcaaaaactgatggcaaaagaacaaatcgcttccggtacagctgaaaacaacggaaccgtcgtctatgtcgccgttgatcagcagtatgcgggggcgatcgtgatcgccgatgaaatcaaagaggacgccaaacaggccattgccaatttaaaagcgctcggcgtgaagcggacagtgatgctgacgggtgattcaaagcagaccggagaagctgtcggccgagagctcggtattgatgacgtgtacacagagcttttgccgggtgacaaggtagaccgcgtcgaagaacttgaagcggcgcttttaccgaatgaaaaactgatgtttgtcggcgacgggattaatgatacgcctgtgcttgccagagctgacatcggagctgccatgggggctctcggctctgatgccgccgtcgaagcggccgatgtcgtcctgatgacagaccagccgtcaaaagcagccgaagccatccggattgcacgccgaacacgccggatcgtctggcagaacatcggatttgctttaggcgtaaaaatcatttttctcctgcttggcgcattcggattcgccaccatgtgggaagcggtcttttcagatgtaggcgtcacgctgatcgccgttgccaacgcgatgcgcgtcatgagagtgaaagcggaataattgtcaaagataattcgtttttcagggttttcttaaacaaggttgtcttggtaaaatagagaagcgggccatccggcatccgcttcttttttattttaaaaacaatgaggtgtctgagtgaaaaagaaacaatcgtctgcgaaatttgcggtgattctgacgttaatcgttgtcgttttatttgcggccatcgtaattattaacaaccaaacggaaaaagcgggcgaaacagtcgccgaacagccttccattaaaggacagcccgtgctcggcaaagacagcgcccctgttacggtagttgaattcggagattacaagtgtccgtcatgcaaagtatttaacagcgatatctttccgaaaatcaaaaaagattttatcgataaaggcgacgtgaaattttcatttgtgaacgtcatgtaccacggaagcggctcgcgtctggcggctcttgcttcagaagaagtgtggaaagaagacccggcatcattctgggcattccatgaaaagctgtttgaacagcagccgtcaagcgaacaggaatgggtcacgcctgcattgcttgaaaaaacggtcaaaagcaccgcgaaaaaggttgatcctgacaagctgaaggaaaaccttgataaagagacatttgcaaaagagctgaaagctgacactgacctgaatgataaattaaacattacggcgacaccgacgatttacgtaaatgacaaagtgattaatgacttctctaaatatgaggagatttcaaaaacgattaagaaagagctgaaaaatgaaaaatagaatcgtatttttatatgcttcttgggtgattgctcttgctgctatgctcggcagcctttatttcagcgagatcagaaaattcataccgtgcgagctgtgctggtatcaaagaattctcatgtacccgcttgtcctgattttaggaatcgccaccttccagggtgacacgcgcgtgaaaaaatacgtgctgccgatggccgtcatcggcgcgtttatatcgatcatgcattaccttgagcagaaggtgcccggtttcagcggcatcaagccgtgtgtctacggcgtgccttgctcatctgaatatattaactggttcggtttcattaccattcctttcctggcattgacggcatttattctcattattatctgcatgtgttttgtcaaaacggaacgcacggcaaaataaagagcctgctccatgggagcggctctttttctattatttgtaccaagctttgtttgtcgcaatctgtctgttatgggagctgtcccaaatatccacggaataggcataatcataattcatgacgcagcggatgccgctgccttgggcgtcatgctgaagtccgaagttatgggaaaactcgtgctgtgccgctttcgccgtgttggccgttccttgatcaaggttcacgctgaaagccgggccgctcggtttgccgttatatacatacgcgataccgccggcgtcaaaacttgattttgcggtaaaaccgacgacaaaatgataattttgatttctgaagctgccttggagattcgataaaatctgagaactgtttgagccggaggaattccaagcctgcacggcctgtacgacgaaatcaatgttgtgatcacggttaaaagcaacatccgcctgctccacgatctggacgattcgcgtttgccagtcgctgtatttggcgcggtattcagcgtccgccaccgccagcactctgaccttctggctgcccgtgctggctttagttgaggctttatcctgactgacattggcattgaatcgtttcgtgccgacctgcttgccgttttcatccagaatttttgtgtcaaccgtctgttcgacttggaccgggcccttcagatctttaaaatgatcggctttcggaagcgggtccgtatacaccgttttcgccggctccgcatgagtgtgcgaatgcgtatggctttcggctgacggcaggccgggaattaatccggcggccaataaaacaggaaaaacaagtgaactgattttcatctcataaccccctttttgttagagaaagtattcaatgaaacttccaataaacctcccaaaatagtataaaataggtaaatgttcttgctcccagccgttgcgagtgaggttgtcccggattaggaatcagaatctttcaaaaataaggttgattttaagagaaagcgattataaaatctaatggtcgtcagaaaatttaacaaataaaaaggagcatatggaatggcctgggagctgcttagtgtaatcggcatcattgcgtttgcggtcagcggagcgattgttgcgatggaagaggagtatgatattttaggcgtgtatatcttggggattgtaacggcgttcggcggaggagcgatccgaaatctgctgattggtgttccggtctccgccttgtgggagcaaggcgcgttttttcaaatcgctctcgcatcagttacgattgtctttttgtttccgaagctgctgttaaggcattggagtaaatggggcaacctatccgatgccatcgggctttcggcgtttgccatccaaggtgctttatatgccgtgaaaatgggccatccgctcagtgcggtgattgcggcagcggtcctcaccggcagcgggggcggcatcatacgggatttgctcgcgggcaggaagccgcttgtgctcaaggcggaaatttacgcggtctgggccgcgctcggagggttaatcgtgggcctcggctgggccggggatgccgccggtttgtatgtgctgtttcttgtgcttgtggcatgccgcatctgcagttatgtgttcaggtggcgcctgccgaatcgttcctatcatatagatcagtaaaaaaccgatttcataaagaaatcggttttttttcataacggcttctgataaaaaaagacgcccgatatgataagaaaaagggtatttgaccataatgctgaataatatgttgcatatatgtttgtaagatgaaagccggatttgtcagcttgatgtcggaggtgccgctgatggcaaaacgtgataaagagtggaaagaagagcaggaaagactcaattttgtcatgaaggaactggaacagaaacaaactcatcttgaagcctcatcgggcggattgaagcaggatattgtcgggctgagaaaaacgttttgggatgatgtcaccgtgaatatggatgatgcccatgaagcggctgagacattttcaagcattaaacagcaggcggaaatgctttcagaacgtgaacggacgcatcggcttcaataccggcagcttcaaaaaatccaaaagctgaaaacctctccttacttcggccgtgtcgattttacggaaaaaggggagtcctcttccgagcggatttatatcgggctgacttctttgatggatgaaaacaacgagcaatttctcatttatgattggcgcgcgcccatctcatctctttactatcaatattccccgggaaaagcccgctatgaagttcccgaagaaacgatagaaggagacatcacactgaagcggcagtttatcattaaaaacgggacgcttaaagcgatgtttaacacggatatgacgattggtgacgaaatgctgcaagaggtgctgagcgggcattccggacagcatatgaaaaacatcgtgtcaaccatccaaaaagaacagaacgaaatcatccgggatgaaaaaagcaaatatctcatcgttcagggagccgccggaagcggaaaaacatccgcggcgcttcagcgggccgcttacttgctgtaccgcggtcgcggggtgcttgatgcccgtcagattgtattgttttccccgaacattttgttcaacagttatgtttccgccgtattgccggaattgggagaagagaatatggagcaggccacctttcaggaatatatcctccgccggctcggacgaaagtttgattgtgaaagcccgtacgagcagcttgaatattgcctgactgaacaaaatcaggacgtacttttcgtaaggctcgcagccattgcttacaaagcgtcaccagctttccaggccctgattgaccgttatgccggatcgctttcggtctccggcctgatgtgtaaacagatcagcttccggggagacatcctgatttcaaaagagcggattgaagcctatttttattcgcttgatcagcagctgccgattccgaacagagcggagctgacggcggaatggcttctcgcggaaatcagcgctctcgaaaaaaaggagcgtaagaaggaatgggtcttgcaggagagcgagctgcttgataaggaagactatgctgaggtttatcaaacactcaagaagcaggcggcagatgatgaacctgcatttgacgaccatcagcgcgaacagcggctgcttggcgccattattgtcggcaaagcctttaaaccgattaagcaggccgtcagacggctcggctttctcgatataaaacggatgtatctccggctgttttcagattggggagctgatgaaaagcccgatcattgggagagcatcggcgctttgaccagaaacgcatttgcagaacggtcacttccgtatgaagatgccgctccgtatctgtatttgcaggatctgttagaaggaaaaagaaaaaacacacaaatgaagcacgtcttcattgatgaagctcaggattattccccgtttcagctcacgtatattcaaagcatcttcccggcggcaaagatgacggtgctcggtgatgtcagccagtcgatttatgcccacaccattacgggcccttcttccctcgccggctgctttcgcaatggtgcagaaaagtatgtcagcctgaagcggacttacagatcgacgcggcagattgttgaatttacgaaagcgctgctggctgacggcgatgacattgagccttttaaccggaacggggaaaaaccgcgtgttttgcggacggatacagaaaatgcgcggcaggaacaattggcggatacaatccgggagctcagacaaaaaggctgggagacggtcgccgtcatctgcaaaacggccgcggaagccaaaaaagtgtttcaggcagtcagcgccgagagcggtgtccgcttgatcaataaagaaaaccagccttttcaaaaaggggtatgcgtcattcccgtttatttggcaaaaggcattgagtttgacgccgtcattgccgctgacgcctctgctgtccagtacaaaagcgaacatgaccgtaagctgttatatacggcctgtacgcgggcgatgcatcatctgaccgttttgtctccgggagaaccctctccttttataaaagaagtgcccgccggcttattcgtgtaagccctttgccaagtgcaaagggctttttatcattaggaatcttaatcattgtcatcatgattatatattttacttacatacaaactttcggtaaagtttcaattagaatattattttgacaattcctatagaaataacgtacgttacgtttaattccttgtgaggtggatatcgttgcaacttcaggtcatgaacagtccgtttaatcaggagcaggcagagctccttaaccgccttctgccgaccttgacagaatcacagaaaatctggctgagcggttatttggctgcggcccggtccgaatccggtgaaacagccgcacccgctgctccggctcctgcagaaagcccggcagtctcgaaagaagtgaccgtattatacggatcgcaaacgggaaatgcggaaggtcttgcgaaacagacggtaaagacgcttgaggaacggggattccaggtcaccgtcgcgtcgatgaacgattttaagctgaataatctgaaaaaagtaaacaatttattgatcgtggtgagcacgcacggagaaggcgatccgccggataacgcgctggcctttcatgaatttcttcacggcagacgcgcaccgaagcttgaagtgctccgttactccgttttggcgctcggggacagctcgtatgaatttttctgccagaccggcaaagagtttgacgagcgtcttcaagagctcggcggcacccagcttgcgccgcgggttgattgcgatcttgattatgatgagccgttttctgaatggcttgacgcggtcatcggcggtttgaacgaaggagcgggaaatcaaacagccgaagcgcctgccgagacgccggctctcggtgaatccgtttattccagaacgaacccgtttcgggcggaggttcttgagaacatcaatctgaacggacgcggttcgaataaagaaacacgccatctcgagctttcgcttgaagggtcgggcctcgcgtatcagcccggagacagcctcggcatctatccggaaaatgatccggcgctcgttgatgagctgatcaatgagctgaaatgggacccaaaacaggaagtggcggtgaataaacaaggagagcgcctcccgctgaaagatgcgcttacttctcattttgaaataaccgtcttaacaaaaccgttcctgcaaaaggccgcacagtttacggctgaccaaaagctgagtgaacttttggccgaaggaaacgaagagcagctgaaagcgtacatcaacggccgtgatctgcttgatctcgtccgggatttcgggccgtgggaagcgacagcggaagactttctttccatcctgcgtaaaatgccggcccggctctattcgatcgcaagcagtttagaagcgaatccggaagaggtgcatctgacaatcggagcggtcagatatgacgcgcacggcagagaacgaaaaggcgtctgcagcattctgtgtgcggaaagactccagccgggagatacgcttccgatttacattcagcacaaccaaaacttcaagctgccggacaatccggatacaccggtcattatggtcgggccggggacaggcatcgcgccgttccgttcctttatgcaggagcgtgaagaaaccggagctgaagggaaaacatggctgtttttcggggatcagcactttgtcactgattttctgtaccagacggaatggcaaaaatggctgcaaaacggtgttctcacaaaaatggacgtcgctttttcccgggattcggaggaaaaagtatatgtgcagcaccgcatgaaagaacaaagcaaagagctttatgaatggctgcagcagggagccgccgtatacatctgcggtgatgaacagcatatggcgcatgacgtgcaccaggcgcttctcgatatcattcaggaagaaggcggcatgagccgtgaaaaagcggaaagcttcctggcagacatgcagcagaaaaaacgctatcagcgtgacgtatattgattttggtttgaaaggagcttattcagcatggtgaacaacattttaaaagcgccggaaggccctccaagtgatgttgaggaaattaaagaaaaaagtgattatttgcgcggcacattgaaagaagtcatgctcgaccggatttcagccggcatcccggacgatgacaaccggctgatgaagcatcacggaagctacttgcaggatgaccgcgatctccgtaatgaacgtcaaaaacaaaagcttgaaccggcttatcagttcatgctgcgcgtccggatgccaggcggcgtgtcaactccggaacaatggcttgtcatggatgaactggcgcaaaaatacggaaacaatacattgaagctgacaacgcgtgaaacgttccaaatgcacggaattttaaaatggaacatgaaaaaaacgattcagaaaatcaatgcggcgctgcttgataccattgcggcctgcggagatgtcaaccgaaacgtcatgtgcgcttcaaattcgcaccagtctgaaattcatgcggaagtatacgaatggtcgaagaaattgagcgatgaccttcttccgcgcacgagagcctatcatgaaatctggcttgatgaggaacgtgtggcgggcactcctgacacggaaacggaaccgatgtacgggccgctgtacctgccgcggaaattcaaaatcggaatcgccgtgcctccgtccaatgatatcgatgtcttttctcaagatctcggcttcattgccatcgtggaggaaggccgtcttatcggattcaacgttgcaatcggcggcggtatgggaatgacgcacggcgatacggccacttatccgcagctttcaaaagtcatcggcttctgcaaaccggagcagctgtatgatgtagcggaaaaaaccattacgattcagcgcgattacggaaaccgttccgtcagaaagaatgccagattcaagtacaccgttgaccgtctcgggctggaaaacgtaaaagccgagctggaaaaccgcctcggctggcagctggatgaagcgaaaccttatcattttgaccataacggcgaccgttacggatgggtgaagggtgtaaaaggtaaatggcactttacgatgtttatcgaaggcggccgcgtcacggactatgagaattataagctgatgacgggattacgtgaaatcgccaaagtccatacgggagatttccgtctcacctctaatcaaaacctgattatcggcaatgtctcgagccagaaaaagaaacaaatcagcgcattaatcgaacaatacggtctgacagacggccggcagcattccgccctccgccgcagttcaatggcttgcgtcgcgcttccgacatgcgggctcgccatggccgaagccgagcgctatctgccgaaattgattgataagattgaagacattgttgacgaaaacgggctgcgggatgaagaaatcaccatccgtatgaccgggtgcccgaatggctgcgcccgccatgcgctcggcgaaatcggatttatcggaaaggcgcccggaaaatataatatgtatttaggagcggcgtttgacggcagccgtttgagcaaaatgtaccgggaaaatatcggtgaagaggaaattctgaatgagcttcgcaccattctcccgcgctacgcgaaagagcgtgaggaaggcgaacacttcggcgatttcgtcatccgcgccggcatcattaaagcgacgacagacggcacgaattttcacgaataagatgagcacttaaaaccaaggatagagacacactgacggtgcgttctctatcctttactaagcagcataaacgctgcaccgcgtcatgaaacagatgacgcagcttgcgaaaaagcctgttttcagagaaaacaggctttttctttttctagaaaaaatgtagctgaaggcaaaaaaagttcgccgtgagcacgttatgagaaattttaaataaaaacgggtaaaataaaagaagaatggttgcgtgcggaaaatatattgaatctgcccgatcatcggctccggcctttggcaaaggcagagaacaggcaataatgatatgatgcagcagatgaaggaggtcatgctttggacatatttttagtcgtactcgtacttttaaccatcatcgcgatctcaaatatcgtaaatcggtttgtcccctttatcccggtgcctttgattcaggtggcgctcggtatcattgcggcgtcatttccgcagggacttcattttgaactgaataccgaattgttttttgttttgtttatcgctccgctgctttttaacgatggaaaacggacgccgcgtgcggaactttggaatttaagagcgccgattctgctgcttgcgctcgggctcgtgtttgccacggtgattgtcggcggttacacgattcattggatgattccgagcattccgctggctgccgcgttcgggctggcggcgattctgtcaccgactgacgttgtcgcggtcagcgcgctgtcagggcgagtgaagatgccaaaaggcattctgcgtctccttgaaggagaaggactgatgaatgacgcatccggcctggtcgcttttaaatttgcgattgcggctgccgtgacgggcgcattttcgctggcgcaggccgccttcagtttcgttctgatttcagccggcggtttactcagcggtgtcgtcatttcttttttgattatccgtttccggctgtttttgcgccgcctcggcatgcaggatgtcacgatgcatatgctgattcaaattctgacgccgttcgtcatctatctcgcggctgaagaaatcggcgtttccggcattttagctgttgtggccggcggcatcacgcatgcggtggagcaggaccgtcttgaatcaacgatggtcaaattgcaaatcgtctcttcaagtacgtggaatattattttgttcattctgaacggtcttgttttcgttattttaggtgcgcaaataccggatgtggtttctgtcatctttaatgataccgcgtttaacaatatgatggtcatcgggtacattatcgtcattacgctgacgttaatgattctcaggtttttgtgggtgctgtttttttggaacggcaagtggttttttaacaaggatcagagcatttataaacccggcctgcgctcgaccctgctgatttcggtttcaggcgtcaggggagcggtcacgcttgcgggttccttttccattccttacgtgctctctgacggctcaccgtttcctgaacggaatttgattctctttttagccgcgggtgttattatgtgcacattggtgctggcgacaatcgtactgccgattttgacagataagccggaagacaatgtgaaagagaagaaagtcaaattgctgacagcgagacggaagctgataaaagctgccttaaccgccattaaagaaaatatgaatgagacaaacaaaacggcttcttttgcggtcattgccgaatacaatgagaaaatgaaaaatctcagatttcagcagttcaccgtcaaaaaccgcacgaaaaaagatgagcggaaagtccgcgcccaagggatacaggctgaacaggaagaattgctgcggctgattgagcggggcgacataccggaagaaacggctgacagccttcaggaacggtttgatgaactggaagtgctgtatacgaatccgtttaaagtcggcttatctaagaaaaagctgaaacgcctgatgtactggatctttttcggtgaacataaaaagccggaaatgacgattttaaatgaagaaggcctcatccgcgccacaagggttaaaacggcaaaagcggccattgaaagcctgaaaaaacacatgaccgaagaaaataaagatgtgacgcttgccgtcatttccttttacaatcacctgattttcaggctggggcactcgtatcacgaacagaatccgagccgccgttttgaaaatcaaaaactcgaaatcaaactgcgggccgtgcaggccatccgcaatgaaatccaaacattattcgaagagcgggaaatttcccgggacatgtcacatgagcttcgccagtacattaatgatgtggaagcggcaatgcttgacggaggagaataaaaaaagtccggcgcacaaggcgccggctttttttgcatattacggccgatggaattcaactgaattgccgtcgcggtcaaaccagcctctgaaggcccagttgatccagccgccatcacctttattggtgaagcttccgtcttcaaacacccaaatgccgtacgtgatgccgtcataaacggcggaaccgtaaaactgaacgccgttaaaatgatcttcatattcctggcttaaattaaacaccatgacgttatatttttgtccggaagcgtagaatgaagattccattaagtttttgacgaagccgtcacggttttgcgccgacttaatcgcgtcagcaatcgaattgccgatgccgagcaggtcaacgtcaatgtttaatccgacatcttttgctgagacatctgatgattgctgtgccatgttttgagggaccggggtttcttttgcggatacaaaggacagaggagtcagagacaaagcggcgccaagggcaacggacatcgggatacgcatacgtttcatatgatttcctccttcaattgtgtggtggctacagtagcgatttacccggacagttacccggctaaccggaatttttgaaaaataggaaaataataacggaagtggtgcttgggcactaaagatggtttttgtgacgacgatgagcgtataattggtttcttacggcggaaatgtgagataataataaccgtttacataatgactagaaaggatggttcaacgtggcaaaaagcttaaaagatactgtaaagcttcataatggcgttgaaatgccgtggttcggccttggcgtcttcaaggtggaaaacggaagcgtagcggcggactccgtcgaagcggcaatcagaaacggctaccgcagcattgatacggcggctatttacaaaaatgaagagggtgtcggcgaaggcatcagagctgcgggcgttgcaagagaagaactgttcatcacgtcaaaagtgtggaatgaagatcaaggatacgaaacgacacttgacgcgtttgagaaaagccttgagcgcctcggcctcgattacctcgatctgtacctgattcactggccgggcaaggataaatataaagacacatggcgcgctcttgaaaagctgtacaaagacggcaaaatccgcgccatcggcgtcagcaacttccaagtgcatcatttagaagagctgctgaaagatgctgaaatcaagccgatggtcaaccagattgaattccacccgcgcctgactcaaaaagaagtaagagatttctgcaaagcgcagggcattcaagtggaagcttggtctccattgatgcagggacagctcctcgataacgaagtgctgtcacaaattgcggaaaaacataacaaatcggttgctcaagtgattttgcgctgggatcttcaaaacgaagtcgttaccattccgaaatcgattaaagagcaccgcatcatagaaaatgccgatatttttgatttcgaactgtcacaggaagaaatggaaaagatcagcgcattgaacaaagacgagcgtgtcggcccgaatccggacgagcttctgttctaagaaaaaacagccctttacggggctgtttttctttacataaatgtctgtgtctgacgttttacgctgaacctgtatgcggctattaataacagggcggcggcgaaggctcccaaaatgatgatgttcagcatcaggctttggaacgtgcggccttgctgcaattgatccaccgtatcgagcacccagcgctgaggcagaaattcggcgattgtctgcaccgttttcggcataatattgcccggaaagaagcagccggccagcaagcatgtcggcacgacgatcaaattcaaaagcgccgatgccgaagcgctgctattggaaaaaccgacggcaataaaggcgaccccgatcgcgcttaatgcaaacagcatcatcaggacgaacagctgccacagcgggaatgacggatgaatatgaaaagcggcgcccataaagagaacggcgaatagaatttggacggccatgataatgatattcaccgccgcgttcgccaatacatactgctttgatgtgatcggcgttgacagaagcctgtagtatgtcctgttttctctctctttaatcattagttccgtcaggttgcctgcggaatagagcataatgataatgagatacccgatgactgagtaagtcatttctttatggttcgatgtatcttgtaaaacagcggactccgtttgaatgggagaatgcttgaaatcggcgtacatctcctgaaaggcctttgcgtctccgccggaggatttgccgattgaggcgacgctgttcatataattgtacaaataagagctgacatatccggtgacctgggcgcctttcagcgaggtcatgccgatgtgagacggtttcccgtcttttacgctttgggagaagcctttttcaaacgtaatgagcgcctccatttttcctgaagcgatctttgatgaggcggacgcagccgtttcctccgaaatcttcacatgatccagtccttttaaaaacgtgaccgtatcctgtgccacttctccgccgtcttgattgagaatgccgatattgagcgtttcggccccgccgttggcattggtcatgaaggagaggaagacgccgatcagcggagccccgatataaagaatgagctgttttttgctttttgtaatccctttgagagtgtgcgcaaacagccaccagaagtttttcatattacagtccctcccgtctttgaaacgtaaatgcggcgatcagcaaaaagagtgccgctaatgctgtatttaaaccgagtgcaggccatgccgctgatacatcatttgcgtaaatgatgttgttaatcgccttattgatccaggataagggcgacagggcggaaattcctccgccttcatatttgtaataggcgccgccgataatggacatcacctgaacgatgatgacggtgattaatctggcgctttcgggttttctggtcaaatagctcaggctgagcccgaagctgacggccaaaagaatttcagaaacgagaatcaaaagcacaagtcccatgtggctgccccaattcgctttcaagataaatttgctgaaggcgacaacggcaagaatcgtcagaacattcacagccaaaatgccgagcatctttccgagaaagatatcgcttttccggagcggggcggcgatcaggcgatctgcggtgtgccgtattctttccccgcggaataaggtgcttgcaaaaatcgaggcgtacagcccgatcatcgtcgtcatggatatcgcgtaaaaatctttcgctttcggttctttcgctttgtgtaaagacgtctgcttcatataatcgcttttgatttgtccggcggaaggcgccttatgcgccttgtaagcggcggcgcctgctttgtattgattggtaaaagcggtcagcatgccttggacaatcgtgccgtttatgccgctccggtcatttgtatagacttgaaaaccggtgttttttacagtgacgaaagcatccgcctgattttctcgaacctcgtttttgccttttgcctccgtgtccgctttttgaaaatagacatgctctttttttgcggctttcataaactcagtaaaatcatgagaaagagggccgtttgactggtccgtatatacgaccttgatatttccgaccgtcacctctgaatcaaaggcgtttgataatgccgcagtaaaaatcagcatgaagacgatcggaaaagcaagcatgaaaataaaagtccgtctgtcgcgaaaactgattttgatttctttcacggcgatgtgcagaatattcatttgcaatcctcctttcagtgaggtcagtcgcgcaggcttctgcctgtcagcgtgagaaataccgtttctaagtcaggggcctgttcctgtaaggagcggatttcaattcctttgtccatgaagtaccggatcaggcggtttaaattgttgacccctgtgtcagagctgattttcacgctgttttcttccagtgtggcggctctgacgccgggcagctcctgaatatcgccgaggctgatgccgtttccggatgacagctcaatcacgacgtccttcgtgtcggtaatgatggaggtcagctgttcttttgtgccttctgcgatgacttttccgtggtcgatgatggcgatgcgcgtgcatatttcttccacttcctccatgtagtggctcgtgtagatgatcgtgcagcccatttcattcagctttttcactgattgcagaatataatttcttgattgcgggtcaataccgactgtcggttcatccatgatgatcagtttcggccggtgggcaagggcgcaggcgatattgagcctgcgcttcattccgccggaaaaatgcttcggcaaatatttgtgtttatcgctcaagccgacgaatgtcagggcctcctcaacccgttctttcagagccgcccctctcaggccgtacagcccggcgaagaacttcacattttcataggcgtttaattcttcgtaaatcgcgaggtcctgagggacgatgccgatattcattttcgttgctttgctatatttgaaaatatcttttccgagaaacagaatgtctccgcctgaaggttttaaaaggcctgagatcatattgatcgtcgtgctttttccggctccgtttgcgccgagaaacccgaaaatctcaccttcttttacggcaagcgacatctggtcaacggcggcataatcaccgaatttcttactcagctgtttgagctccaaaatgttcatgtttccacctctatgtcttatgatgctcttattataaaaaaaagaatgaacggccgttagtgcagctgttcattcctttgacatgagaatcttcatatttttcacatgaaaacattcacttattcaaccggaagcaatgtcgtgacggaaaaaccggccgtgccgtcaaaaataacggttccgtgcaaaacggccgcccgttcttccataccgagcatgccgagtccttttttaaagcggacggcgccgtttccgttatctttcacttccgctttcacggctttgttcagcacatggatatcaatgaagatctgtgtggcatcggcgtatttcattgcattggtcaaggcttcggttacgttttcctgaatgactctccaatgcatttgcgtcagtctgtccaaatcgccttgatgcgtaaacggaaccggcatcccgtttttggccgaaaattcatcaataaacgttcttaatctgtgaatgcccatttgttcagcgggcggtttcatatttttaagcgtaatgcggatatcctctatgccttctttggaaatggtaatggcgttttggagcagttcagccgctttgtccggatgggagccgagcatccgcttcgccgcttccatctgaatgagcgcgcctgtcatggaatggccgattttgtcatggatggcttgggacaacctgtttctttcttcgagtttgccggtatactccgattgtttgatatattctgtgctgctgtgcagctgtttcgtcagtttttcaatgcttgagcgcatattgtctgactgctcttcatattttttcagccggtcgctggaccgggcggccaaaacgaatatcgccaagcagaacaaggtcatgacgatataagtcggaaggtcgccgtacgggataaataaaaacggcaaaaacacgagcaggcagaacacatagcggtgaaccggatattcggcaagaacggcaaaaatggcgggcggcaaaagaaatagaaacgccggatggcctaaggcggaaagccaggcagtcaatgcaagcgaaagcagggtgatcccgcgcctccaagcgggcggcctgatcatgcagaccgcaatgcccaaagacagataagcgagcagaaacaagacggcgtacggcgtgtaagggcggtctgccgatacgaacaaaaaagccgtataaaaaatggcgatcagtctgctcatcagcatccaaaaatccataccgttcaacgcccgttatccaccttcccggtgatataataaatcgcgatctgcgttctgtgctcaagccccgttttccctaaaatagatgaaatataattggccgtcgtcccttcagaaatgaaaagctgttttgaaatttccctgttcgacagtcctttcgcaataagcgacatgatgctgagctctctttcagtaaactggctttcatcaatctgatgcgcggcttccgccggccggaaaaggctgtcttttattttatccagcacggtgtcctgaagaatgctgtgcccgttgaaaacgcttttgatcgcatcgcgtatccgttccggttcggtattttttaataaatatcctttcgcgccgtttttaatcgcttctaaaatatactcatcgtcgtcaaatgtcgtcaggatcatcggcttcgtatccgtttcctccgcgatccgttttgcggcttcgacaccgttcatcaccggcatgcggacgtccagcaaggcgatatcgacgggattgtgtttacaatactctgccgcctcgagtccgttttccaacgttgccgatacagtaaattcctcatatgtatgcaaaatgattttcattccttctctgatgaaagaattatcatccgcgataatgacattaatcttcatggccgcaccctttgtgtgttttttgtttcattatataccatccgattttaaatcaaaaagccttccggcgaaaggtgcgcggaaggcggatcggtcaagcgggttttttcaattgaatgaaaaacagcatcaggaaagaaatgatcacaatacagatcacccacacccaggcgagtgtttcattgccggagtccatcgcgacgtaaatcgctgtcggcagcgtttgggtgacgccgggaatatttcccgcaaacattaaagtcgccccgaattcacctagcgcccttgcaatactgagaatgcttccggtcaagagggagggaaaggcaagcgggacggaaatacgggtgaacacctgccatctgccggctccgtctactttcgccgctccctcggtgtcagcatcaaccgcggcgaagcccgttttagcggactgatacataagcgggaaggcgacaatggccgaagcgatcaccgcggccgaccacgtgaaaatgacgggctggtgaaaaatccgctcaatcgcccggccgataaagctgtgtttcccgaaaataataatgagaatgaagccgacaacggtaggcggaagaacgagcgggagcataaacagggtctccacagccgtttttccgggaaatcgcgctttcgccatccaggcgccggcaagcgtcccgagaatgatgacggcgatgcctgatgccaaagccacctgaaacgacagtacgacgggagtgaaaaactccgaagccgtaatgttacttggcagtaaatccatatttcttaaacactttcatcgctttatctgactgcagatactgataaaacgcttctgcttctttacggtgctttgtatccttgacgatgccgagcggataaacgatctgatcgtgcgttttcgccggcgcttcatcggtgattttcacctttttcgaaatcagcgcgtctgttttatagacaagcccggcatcgacatttccggtttcaacataagaaagcacctggcgaacgtcttttgcatagacgactttatcttttaccttgtcccacagggataatgccgtcaatgactgtttggcgtattgtccggccggaacggattcaggcgtgccgagcgcgattttttccgcgctgtcttttttcaggtcattcagatgtgtcaggtgtgcgctgtttttctcaggtacgatcatgacgagatcatttttcaaaagatccgtgctgtcctttttgtcgatatctccgtcatgaacgagcttttcgaatttatcttcggctgccgagaagaataaatcagctcccgcgccttgtgaaatttgtttttgcaatgtgcctgatgatccgaagttgtcttgaatggttacgtttgaatgtgatttttcgtagttggtctggatttcttcaagtgcatcctgagcgctggctgccgcagaaacggtcagcgtgactttttcgttttgtccgcccttggacgattgtccggatgagcagcccgcagttgccaggaaaacggccatagccgcagttgtgagtagtgtcgctttctttttcaacattgtgcaccccttatagctaaatatcattagatcaaactaattataacgcaattgtacgtgatggtgcggttttttttcaatatctgaacagttataataaaaacggagcgtgataatatgacagaagccacttcctatacaatagaagaagttgcgggccttttgaaggtctccaaactgacagtatatgatttgataaaaaaaggactcattccggcgtacagggtcggaagacagatgagggtcgatgaagaggacttaaaacaatataaagcaaacatgagaatgtcaaaaaagccatccgtatcagaagctgctgacccgtcccgcgggcgggagccggaaaaaaggcagtccgttatcatcagcgggcaggatgtgtcgatggacctcctcagcaaacagctggaacaaactatacaggcggctccgctccgcaagtacagcggcagtttgaacagcctgatcgagatgtaccgcggagcttgtgacatcgtcagtctgcatttgtacgatggggagacggggcagtataacatcccgtatgtgaagcgcattctttcaggggagccgtttgcgctttttcatgtcgtgctgcggcaagccggattatatgtgaaaaagggcaatccgctgaacattcagggttttcaggacatgagccgaaaagatgtccgcatcgtcaatcgcgaaaaaggatcaggcgcgagggtgctgctggatgaacagctcagatcttccggcattacgccgtctgatgtcgccggctatcatgacattgtcacggatcatctgtcagcggcttcacaagtatcaagcggaaaggcggatatcggagtcgggtcgcagcatgcggcgcatatggcgggcacggactttatcccggtgatcagtgagcagtacgatgtggtcgtcttaaaacaaaaccgggagcttgttcaaagcgtgcaggacattcttaattctgaggaattcaagtctcagctttctcaattatccggatatgatacgaaaatgaccggacggcttatatatgaaacatgaaaaatccctccatataacggagggatttttttattgcttataaaaccgcagcaggtcgccgtttaatattttatcggaaagcatcagctcttgttccgctttttctttctcatcgctgcacgcgctcatgtcagaaagcggttcacccgttttacggctgtaacacgtatttttcgtataaatatgatcatccgtgataaagctgccgtttctcagcaccgcaaacggggtccgctctctggaaaacagatcattgccgaactgaatgctgcctttcgtttcaatgccgagcaggtgaagcagcgtcggtcttacatcaacctgtcccgcggccgaagcaatcgtttccggcgcacggtcggtcaccccgggaatatgaatgataaacggcacgcgctgaagctgaaccgtatcaaacggagtgatttcctctttccctaagaattcggcaagtccttgattatgggcttcggatataccgtaatgatctcccatcaggacgatcatcgcgttgtcatacagtccttcttttttcagcttcttgaaaaagtgtttcagggcctcatcttcatagcggaccgtcgtcacatagcggtttaataactcgctgcttgtgtccggttcttcaatgagctgatcctgtttatcaatttcaaaaggaaaatggttggtcaaagtcagcaggctcgcgtaaaacggctgcggaagcttctttaatttttccgctgactgttcgagaaattccttatccttcaggccccagcctgttgaattttcctgtgtcaccttaaattcatccgcgtcgaaaaaacggtcgattccgaatgccccgtacatctcatcccggttccaaaaggccttatgattggcatgcagaacggctgaatagtattgacggtcttttaacatatggtacatcgtattgaaccggtggccgctttttgtgaaaaaaacggcgccgcttgaagacggatacagcgaattcgcagtaatgaattctgaatctgaggtttttccctgttcagtctgctgataaaaatgagtgaagtcataactttttttccgcagtttatttaaaaacggggtaatctcccgcccgttgacccgctcatccattacaaaacgctgtgttgattcgagcgtaacaaaaatcacattgcgcccctttgcgagcccgaactttgattcggacggcctgctgtagtcggcttgagtgtaattcgcgaccgccgcaaggctgtcttcgtcggcaaacgctttagcccctgcattcagcgtctgcgaaatggtgtcatacaaatgaaagtggaacaggccgattccttttacgagcgcttcacgatcaaaagggtgcttgaacagcttcggctgctcagcctcagacagcgcaaggttgcacagcatgaggccggctgatgcccacgcatacgctttaacggtacgggtgctggctttacctttatcggctttatgccttttaccaagataaaacaaaaccgcaatatccaaaaataaagcgatataaagcgggtgaaacagctcttggacgctgcttcccatatcacccatattgctcgcctgaaacaaaaccggtatggtgataaaatcaatataaaacccgtaaaacaccgtattcgcgattaaaattcccgtcagcatcacatttgccgaaagcagaaagatccgctgttttttttctgtcagcagcagggcgatgccgaacagcggcacaatgaagctcagcggattaatgagaagcagacattcctcaagaaccgaattgttctgcagatcaaaaccgagcttataaacggcataggttttcatccacatgaacaggatggacaggcataaaaaccgatgattgctgaaaaaggttttcttcatatgtatgactcctcaccctaaaagcgaaagatgctttttgtttaagagatgcggccgtgaaccagttcgtataaataatagcaggatacaatcgttaagccggccagcacaagctgctccgaaaagctccccgttctcatataaaggggaagacggaagcggatggcggacggaaacagcagtttaatgccgttgacggtccatgcgtcaagcacaagatgactcgccattccgatcatcagtccggcggaaatgctcggattcggaatataggttgccgtaatgaaaaacataataagcataaacagcaggctgtgtgtaaacgttctgtggccgaacaccgtgcttacgattttggacagaacgggcagcgtcctgccgattttgcttttcgtatggcatatgtcgggaatcagcgccccgagggcacccgctgaggtcataaggaccggatcatacccgtaataatacgcaattgcggaacaagaagcgatgcctcccatgatgtgtgtttttcctgtcatttttcgcttctcctttttatttttgccaaaatcccctgaattacaaatatatcaagagaatgcatgtttgatcaacaaactttacctgttccgccaaaaggaaggagacgcggattccgcatattctgccgcggaaaaagacacattataggtgtaccatatttgataaagaggtgatacagatggctttctttaacaaagaaaaaggaaaaaacagcgataaaaacaaaaatgtcattcaaggcgcgcttgaagacgccggtgcagctctgaaagacgatccgcttcaagaagctgttcaaaagaaaaaaaacaaccgctgaccatataagacgggtagggcgaacgctctatccgttttccatctaatttttccctttgacagatctttttatctctgataacctctgagtagaattgaatgataaaaatcctcactctttctcggtgaggtagaggttgcgcttgatgatgagtcgcacatgccaggctgataggggccgcaaaacatgtgttaaaggcatcagcgccgaagtgtaaagaaagccgatccttctttatgctgggactgtatctgaataagtgcaggactgccgcgtgctttttcgcggagggctatccggagatcaagggtgtgtgtgtttctttaagcatggacttttgttcaggctttttttgcgtgtaaatatgatctcggggtctggtccgtacgaatgaacaaccaggaggtacaggaatggaacagacgaaaaaatggggtttttggttattaacggcgtttgtcgtaggaaatatggtaggctcgggcatcttttcgcttccgagtacgctcgcaaaaatcgcgagcccgttcggcgccacatcggcatggcttttaacgggagccggtgtgttaatgatcgcgctggtcttcggccacttatccatccgcaagcctgagctgacggcggggccgcaaagctatgcgcgtgcgctgttcagcgatcggaaaaaagggaatgcagcgggcttcacgatggtctggggctactgggtggcgagctggatcagcaacgtggcgatcatcacgagccttgccggatatttaacatcatttttcccgattttaacggataagcgtgaaatgttttcgatcggcggtcaggctgttacgctcggccagctgctgacgtttgccgtatgtacggttttattatggggcactcacacgattctcgtcaccagcattaacggtgcgagtaaattaaattttgtcacgacgttttcaaaagtattaggatttattttctttatcattgcaggtttatttgtgtttcaaacgtcgtttttcgatcatttttattttccggttcaaacaggtcctcacacagttgagggaatcggcggacagatccacaatgcggcgatttcaacattatgggcgttcgtcggaattgaatcggcagtcattttatccgggcgcgcccgttcgcagcgcgatgtgaaacgcgccaccattaccggattattgatcgcgctcagcatctatatcatcgtgacattgattacgatgggcgtgcttccgcatggtaagcttgtcggctcggaaaaaccgtttgttgacgtattgtacgcgatcgtcggcaatgcgggaagcgtcatcatggcgattctggcgattttgtgtctgttcggaacgatgctcggctggattcttctcggctctgaagttccgtatcaagcggcgaaatcaggagactttccggctgcttttgcaaaaacgaataaacagggaagcccggttgtgtcgttaatcgtaacgaacgtgatgtcacagatctttatcttttcagttatttcccggacgatcagtgacgcgtttacgtttttaacgacggcggcgacgctcgcttatctgattccgtatctcgtgtcagcgttttacagcctgaagctcatttttacgggtgaaacgtatgacgagataaagggttcaagagtaagagacggtatcatcgccatccttgcctgcatttattctttttatgtcattattaccggaacggccgatttaacgacctttattctcggtatcgggctgttcttcgtcggtttgctgttatatcctttcgtctcaaagaaatttgcaaacaacagacaatcggtatgacaaaaagacatctcacgtctgtgagatgtcttttttatttgcggcggcgggttacgttttgacggcgtgtatataatgaatggtctcgaatgcggttaaatggtcagtgcgtccgctgaaaaaacggtcaagtgtaaagcgtaataaaaagccgctgtgacagcggcttcggggttacttcgttaagctttttgtgatgtagtcgagctggccttcaagtgagatcgggtctgagaaatagaagccgatcggatcaatgcggtagacatggttttgtttgacggcatcgaggttcttccagattgagctgtcaagcacgcctttgtcgtcaccgccggcctgccatggccccataaagatgtagtctcccgcgaagtcaggcagtttctcgagtgaaatgctggcgtagcccggtccttgattaatggctttttcctgcgtcagttttgtggccttcagcccgagtttgtcataaatgatgcttccgccgcggccgaagtctttaccgaatacatagatgtcttttccgtttgtctgcatgatggagatggtttttgacccgaccgctttttgaacctttgttttagcggcagcggttttcttgtcccattcagccagccatttgtctgctttatcttcagtgcctgtcattttcgcaaactctttgaattgatcaatgttgctgagcttgtcatatttaatggcgatggtcggcgcgattttttccagtttttcaatatcggcgccttgtgtcgtccagacaacgattaaatccggctttaagtcaatgattttttcaacggacgtgccgtcgccgatgtttgtcacaccttttgttttccctttgtaataagggtttttaaatacgttttgcggcgcgccgacaacattgatgccgagctgtttaaagtcgccgtagtagccgtcagccatgacgacgacccgtttcgggtgcttcggaattttaatattgccgttttcggctttatacgtgatggtttcttctttttcagaagaacctttcgagtctgaagaattgccgcatgcggccaaagcggcgatgagcagcatggcaatcagcgctgcgccgattttcttgtatgtatggaacatctgacattccttctttcatgagtattagtgataaagagaatcattatcagtgtgattatatcactgctttcatagagaagcacgctcttttttaagaaaaactttctttttttatatgaaattaggtctattaaaagagaagataaaagtgctatactgaaacaagtcattgataatcattatcattaccattcttgttttgagaaaggaagaacgagtgttgggtctattgaaaaagaaacagacaatgacggctctaggggcatcagggagtgaaatccagtggacggcgcgttcattcagagcggctgtgctgctgtgtgccgggattgcggttttattgatcggcgcggccctgtctgtttccatcggagctgccgatattcatctgcggacggtgtgggatgctctctttcactttcagccgcaaaatacatctcatcaaatcatacgcgatctgaggctgccgagaaccgccgccgccgcgctcgtcggggcttttttagctgtgtccggggcgattatgcaggggctgacgcggaacccgcttgctgagccttccattatgggcgtgacgtcggggtcaggatttgcgatcgcattggcgtttgctttttttccgggcctgtctgcggcgggacttgttttgtggtccttcgcgggagcgggaatcggagcgcttattgtgtttggcatcggcctgttttcaaaaggcggtctgacaccggtgaagctcgcgctggccggtacggcagtcggctatttcttaacggggctttcaagcgcgattgcgatccgttttgatgtcgcccaggatgtgaagttctggtatgccggaggagttgcttccgtgaaatgggaaggcgtgcagctgctgttggcggtcggggttatcggacttttgctggcatttctgattgcgcgctcagtgacggtgctgagcttgggtgaggagctggccaaagggctcgggcagtacacatcgcttgtgaaagtaatcggaatgtttgtcgttgtcctcttgacgggggcttcagtctcagtcgccggagccatttcttttatcggcttggtgattccgcatatcacccgatttttagtcggggtagattacaggtggatcattccctgttcggcggtattcggcgccgttctgttagtcttcagtgatattgccgcaagacttgtcaatgcgccgtttgaaacaccggtcggcgctttaaccgcccttatcggcgttccctttttcttttatttggcgcgcagggaaaggagagggctgtaatgaatgtaaaatcgaaaaaaccgctggcggtcatggccgttacgtttttgctcatatgcatcgtcttttttatcagcttaaacatgggcgtgatccggattgcgcctcttgatacgctacgtgtctttttcggacaaggggatgcccgggatcagctcgttttatttgaattcagactgccgcgcatggtgctgtcattgctggtcggcgccggaatcgcggtttcaggcgcgatttttcaaagcgtgtctcaaaatgacttggcggagccgggcattctcgggattaacgccggggcgtctttggcggtcgttttgtttatcttctttttccaaggatcagctgctgatttaagcatggccggtacatggctgcttccggtgagcgctttggcgggggcttttctggctgcgctgctcatctatgtgctggcttggaaaaaaggcgtttcacctgtccggctcgttttggtcgggatcggcgtcaatgcggggtttaatgcgcttctcttgatttttcagctgaaaatggacccgcgggatttcatgcaggcgcttgtatggatttccggttcgatttggaacgccaattggaaaatggtgctgtccattttgccgtggctgctggttcttttaccgttcagcctctataaagccaggtatttaaatgtgctccagctcggtgatcagctggcggcggggcttggcacccgggttgaaaaggagcggcgcgttctgctgatgtgcgccgttgccctgaccgcgtcatgtgttgcggcagccggcggaatcgcttttctcggactcattgcgccgcatttggccagaaggcttaccggaccgcgccaccagacgcttatcccggtttcggctttaatcggagcatttttatttctgcttgccgatacgctggcgagaaatgtgcttgcaccgtccgaagttcccgtcggcctggtgatttccgtgctcggagcgccgtattttgtatatttgctgatgaaaacgaaatagaggaaggagactgccgcgatgaactcattatcggcggaacagcttactgtcggttatggcgaccgtttgatagcgaaagaattggatatcgccatcccgaaaggaaaaattacaacgctgatcggtccgaacggctgcggaaaatcgacggttctcaaaacgatgtcaagaatcatgaaaccgaaatccggcgccgtctatttaaacggacaggcgatcatgcaaaaatccacgaaagacatcgccaaggaaatggcaattcttccgcagacgcctgaagcgccgagcgggctgacggtgtacgaacttgtttcttacggcaggtttccgcatcagtccggaatgggccgtttgagtgataaagaccgtgacatgatcaaatgggcgcttgaagagacggggatggccgaattttacgaccggccgatcgaagcgctttccggggggcagcggcagcgtgtgtggatcgccatggcgctcgctcaagaaacggagctgctgcttcttgatgaaccgaccacttatttagatctcgcccatcagcttgaaattttgcagctgctggacaaattaaacaaggagcagggccgcaccattttaatggtcattcatgatctgaaccatgccgcccgtttttcccattacatgatcgccctgaaaaaagggcgcgtcatcaaggaaggaacggcggaggaagtcatgactcccggcatattggaagacgttttccaaattgacgcacagattgtaaaagatccgcgcacgaacaaaccggtctgcttaacctacgatttaatccggcatgaaaacgcaacggtatgatgaaaaaaaacgcagagccattccggcctgcgtttttttattgcgcccggggctgcttttgtccggagacgcatttatccaaaacgaaaaaaacccccgccacaatcagctcctccgtcgttgacagccaaatcttttcaatcagtttatccgtcgtatacgcggtcatccagaggaacagcagctgaacggtgctggctaaaaggagaaaaggcagcctgcccgtcccaaaaaaggtaaagctatgtatcatcagccgctcaagcggttcaaaacataaaccgagaaaaataaaaagcacggaaaaaagcaggacgtacgccatcgatccgtagctcgtcccggctaatgaaaatacggccatcatcacgataaaatacccgaataatacggcagcggctgccagggcataccggagcacctgaagaaaaaacattttcgtcccgttttgattgatcatctgttcagctccttttcacacagaggagacttgcagagacggaactctgcaagtcgatgtatcttcagcatttctttttgacgacagggtgtttctctttcgaaagaatatccgtaaagtctttgcccagatccagatgctgctggacgaatttctcaggaagcatggcaagccattggttcagggacacatcggcatagtggtcatccttgaagatttccaggaagacgagcggctcatctcccaaattctccacatagtggcccattgcgaacgggacgtaaccgacatccccggcctgatagttaaatgttctcgcatggccgtccgatgcaaaaaccgtcatccgtcctttaccggaaatataatactgccattcatgcgtgttcggatgccagtgcagctctctcattgcgcccggttcgaccacgacaagcgctgaagcgatcgttttggacactttgaagtttgtggaatccgcgatatatactttgccgccatctgtctcagcagtcgggccttcatccagcaggcggtaagtgaacggataaggcacttcaccgttcgggccttccacgatgtcatctttcagcttcccgggaaccggctcttcaaagatatatttttctttcccgggcaggccggcgaggtctttttctgaaaccccaaagttgttggcgatgacatcaagcggtgtgtgggcaagccagtcagttacttggaatgtgctgttttctgagaaagaaccgtcatcaaaaaccaagaggaattcacagccttctttcagcgcctgaatggagtgcggcaggcctgacgggaagtaccacagatctccttccttcacgtcatcgataaaactgcgtccctgttcatcaacaatcgtgacccgcgctttgcccgtcagcatatatgcccattccgcttctttatgccagtgcagctcacggatggcgcccggttttaaacgcatgttgacagatgccagattttcagaaatcggcagctcgcgaacggtcacctcacgcgcgtatccgcccttttccagccggttgtgcacatctgagaaagagaatttcatattatccactgtgccgtgatccgtttccggcggcgtcagcatatccggattttggcggtctctttcaaggttgcgcggaatcgtgacggtcgctcctttgtctcctctgatcggctgcgggatattgcagttgttttcttttgacatgtaaatcgtctcctctcaagctttgttttttcagaaagagaatgtgaaaggcctttcgttttcccttctgctttgttaagtgatgcgttccgatgaaaagtcaacttcgtgtgaaaattaatttttcattttctgatctttcagttccgtcatcagttcgatcagggcgtcaaacttcttctcaaaccgtgtgagaagatacatggcaatcagagccggaaagccgagattgccgatctgtctgaccgcttcttctataaaaacctgatccattgtcagccacctcctgacttgacctgcagtcatgtatataagtgaaagaaagagcggctcttgtaaacctgatatcccgattgagggtcttttttttgttccggcaaaaccgggacataaggagtgcggaatcttagtcggaaaggagtagtttacttttttttgctttctttcatttaatttaaatagggggcggttttatggactatcaagttcttttacggtcaaaatgcaaggaaattatgaaacatccgatcgttaaacattttttaagtgacccaaagcattacgagaaatttaaaaatgtgctggaacattcagacgagaaggatgcaaaatcactggacgaccattttaaacagttttataaggaaatccggatcatcaaatatatgaactctatgatccggattttctccatcgattttgacaagcgcatccgtaaaaatcagaagcgctatccgctgacggtggatcagccggagggaggtgaagcgcttccctatgaaatgggaaaagacgcgtttgaagagtttctgcggaagcagggggatttgagccagcatgtccaaaaccgtgatttatacgaagcgcttcagacgttaaccgataaacaaaaaagcgtgctgacgaatatttatcttcacggagcgacgatgaaggagattgccgagtcgctgggtgaatcacggcagaacatttccaatattcataaaaaagggctcgacaatctcagaaagcagctggacaagcaaaaaaagggggaaaataagcagtgaacgggccatttgacttcaacaaagagaacacagataccgacgaaatggaacttttgatttcgcgtttttcgccaatgataaaaaaaaaactgagcaatacatcataccaggaaagagaagatcttgaacaagaattgaagattaaaatcgttgaaaaagcggacatgctgttatgccaggaagtgccgggtttttgggaatttattcttcatcttataaatgaaagctcctgacaaaagcggcggaatgatggatattccgctctgacaacgtgagaaaaacgagaagagatgtccggtctcgtttttcttttctgtttccccgcaagacctccgcactaaaaaggtaccaaatcttatccatataatgatatgatgaaaaaaacaaagagaaaggaacgtccaaggtggaaaatgcgtcaattttaattgtagacgatgagaaggcgatcgttgatatggtcaaacgcgttctcgtcaaagaaggctatcacaacattaagacagccggaagcgctgaggaagcgatcgagtttgttaaacatgaaaccgcggatctgctcgtgctggatgtgatgatggaaggcatgtccggttttgaagcatgcaccgaaatccggaactataccgacgctccgatcttttttctgaccgcccgttcttctgatgcggataagctgtcaggatttgcattgggagctgacgattatataacaaagccgtttaatccgctcgaattggcggcgcggatcagagcgacgttaaagagaacctataagcgcgaagagaaaacggcggtaaagacgtattcatacagccatttttcctattcgccgcaaaacgccgagctgatcgtcgggggcgagcccgtcagctgctccgcacagcttctgcagctgcttcaatatttctgtgaacaccctgatgtggtgctctcaaaagatcagatctatgaaaaagtatggggatatccgtcttacggcgacaacaacaccgtcatggtgcatatccgcaagctcagagaaaaaattgaaaaagaccccagcaatccgtcctatattgtaacggtgcgcggcctcggttatcggtttattcccgatcaaggagaaaaaggaacccgctcatgagaatgcgcggaaaatttctgctccactttttcggacagcttctgcttgtcatcctgctgatgtccgttttggccgtcgcttcttttttctatttggattggcgtttcagcgaagcggaagccaatgcgggactgaccaaagcgaccgcggactcgtttgaagcgtggcttgataaaaacgaagacggcacatgggatgtcgatgaatttttaaagatgtcggtccgaaagcagaagggctggcttcagatcattaatgacaatgaaaaaacggactacgcgtacagagtgccgaaagacgtcccgagccattacagcagaaaagatctcttatccatttaccagtaccggaattttgacaactacaagctgaattactggacggtcacgataaatgatgagacctatttgattctgttcggctggaaatccgccagtgagcagcttctcacatacatcgaatcacaggagccatccctcgcttccctttctcaatataaaaagagcacgattgattatattaaacgggaaaaaggggcggtctaccttctcgaagacagcggcagactgctcggggatatcaacagcacgaaaaaagaacggaacaccgtcaatgagcttgaattgctgaaatacagttccaagccgtggaattacaaacgggaaatttcttttaaaagactcgataaaacgaaatggatggtcgcgtcggtgccgaaccccgtgtacatccccgatcacgagtttaacaaatcatttttgagaaatgtgatgaaaaccctcttcctcttgatcggaatcttagtatttatgatctgcatcctgaccatctggtactctttccgtttcggctggccgctgtttcataccatcaaatggctcgtcaatttatcaaagggccggcttgaagagccgaagaaccgcaaaggacagccggtcagcaaaaacaaaaaaggcaaaacaaaacagccgttccgctttttcgccgagattttcgaatcgatggatcagctgaccgacacgctgaagcgggataagaaaaacagagaaaaaatccaggcgacaagggaagaatggatcgccgggctgagccatgacttaaaaaccccgctgagcacgatttacggctacagcatgatgcttgaatcgaagcaatacgactggaccccggaagaagtcaaagaaatggggcagatcgtccgggaaaaatcagaatatatgtctaagctgattgaggacttaaacttaacataccgcctcaaaaacgcggccctcccgatcgaacggcggctgatcaacgtcgtgccgtttatcagaaacgtcacgaacgatttcacgaaaaacacgttctcggaaggatatgacatcgcctttgaaaccaaaaaggaagacattcttttcgccattgatgaagcgtggttccgccgtattctggagaatctgctggcaaacgcggttaagcataataagaaagggaccgccattcgggtcgtgcttgaggaatcagccgaacagctcattctgaaggtgaaagataacggaagaggaatggacgatgaaacgattcaccagctgtttaaccgttattatcggggaacgaatacgaagggaccgtcagaaggaacgggactcgggctcgccattgccaaggagctggttcaccttcataacggaaccatccatgtcaacagcagaatcagcgccggaacggtgattacgattctttttaaaaaagattgagtttggacgccgctttgtcgggaataacaatagaagactgacaagcaaaagaggtgttcacacatggaagcagcattacgagcagatacgagagcagttatcggagaaggccctttatgggataaggacaagcaatgcctgtactgggtggatatactgggcagccagctgcatatcttcactccggctgacggaatcaaccgttccgttaaattcaaatcatttgtcacggctctggccttgtattcaaaggaagagctggtgatgacgatgaaagacggtttttacctgtacaatcttcgggaagatacattgacgaagatgaagcagccgaaagacatgcgggaagatatccgtttcaatgacgcaaaatgcgatccgtccggcagattatgggcgggaacgacgagcatggaaggcaaagaagaggaggcttcgctgtaccgtctgaatacggacggcagccttgccaaaataaaagaccaggtctccacctcgaacggtttggattgggatcgggaccgaaacctgatgtactatatcgatactccgacgcaggaaatcgtctgttattcatatgatcctgaaaccggagccgtatcagatccgaaaacggtctaccgctttccgaagtcgcaaggatctcccgacggaatgaccattgaccgtgacggaatgctgtgggtggctctgttcggaggcggccgtgccgtccggattgacccgtttttgcataaggaaattgcatctatcgaagttccggcgaaatacgtcacctgctgcgcgttcggaggcagagacttgaacacgttatacattacgaccgcgacggaaaaattgacggaagccgaaagacttgagcagccgcatgcgggcggcctgttttcagcagagcttgagacgggcggctgggagccggttccgtttgcaggcatgatgtaaaaaaaagccctggcatatggggaagttcccattgtgccgggcttttttgtgttaaatggagcggatgatgccgccttcaacccgctgtgcggtgccattaatggcagaagccgctgatgaagcgagaaatacaatcgtattggcgacttcttccggggttgcatagcgctgaatcaatgatgtcggttcattcactttaaaataatcccggacgaagctgtctgtgtcttctccggcagcctttgcggctccttccatgtaagaagcgacgccttcggtccatgtcggtcccggcagcacggagttgaccgtgacatttgtgcctttcgtcatttccgccattccccgggacaagctgattaacgccgttttcgtcattgaatacggaatcatttgcgcaagcggtttgacaccggcttcactggagatgttcagaatccgtccgctgtttctctcgagcatttgcggcagaaaacgccggcacaggcgcacggcgctcataacattcacttcaaaataccgagtccattcgtcatcagacacctcagcgaagtcttttacttcaaaaaaaccgagattattgacgagaatatcgacttccccgattacacctgcgcgctttatcaagtcatccgcctcatcctgacgcgataaatccgcagcgatgccgtggaccgttccgtaagcggaaagctcctcaaccgtccgttccacagtttctttttttcttccgtttataatcacctcggcgccttcggctaaaaagctttttgccgcggcttttccgatgcctgaggttgatcctgtaatcaaaacgagctttcgttcaagctgtaattccatgataatcctcctttttacaccattgtgtaacagtatacatgatgaattttagtgtgtacgaacaatttgctttcatgcaaaaaggccggatatacaagccttaaagacttatagtataattactgcgaaaaaaggatacgaatgtcaaagagacaatcgtttaccataatcagggggagttaaaagaatgaagaagatcactgccgtctgggcggcgcttttggtcaccgcctttgtgatcgccggctgttccggcgcacaggaagaaggaagcgcggccaaacaaaaagccgtctcaaccgaagcattcccggtaaccattaaggatgccgcgaacgaaaaagtaaccataaagcaggcaccggaaaaaatcgtttccctcatgccgagcaatacggaaattacatacgcgctcggactgggagataaggtcgcaggcgtcacgacaaatgatacatatccgaaagaagcggtaaaaaaaccgaaagtcggagatatgaatgtgaacgctgaaaaagtcatcgcgctgaagccggatctcgtgcttgcccacgcgtcctctatgtccgcttccgccgatgcgatgaagcagctgaaagatgcgggcatcaccgtcttaacggtcaatgatgcgcaatcgttccaagatgtgtacaaatcaatcagcatgatcggaaaagcggccggcaaagaaaagcaggcggataagctgatcaaatcgatgaaatccgacctttccggcatagaaaagaaagcggcggccatttctgaaaaagacgaaaagaaagtattcgtcgaagtgtctcctgacggctacacgacggggaaaggcacgtttatgaacgaaatgcttgaagatatacacgcgaaaaacgccgccggcagccagaccggctgggttcagctgacggatgaagcgattgtcaaaatgaatccggacgtcatcattacgacagacggcgtaaaggccgctgaagtggaaaaacgcgccggctggggtgccgtcaatgcggtcaaacaccacaatgtctattctgttgatcccgaccttgtcacacgctcaggcccgcgccttgtcaaaggggtcgagaagcttgcagaaagcgtttatcctgaaacgtttaaaaagtaaccgcccgctggcctacacggtcagcctgctgtttttagccgtttgtacggcactcggcatttcaatcggcagtctgcatattcctttatccgacgttttttggatcgggatcggccggacatcctcggctgaccctatgaatgtaaatattatgatgaatatccgcctgccgagagtcgttctggctgcccttgtcggagccgcgttatccattgcgggagcggcgtttcagggacttctgaaaaatccgctcgccgacccttatacactcggggtatcttcgggagcctcagcgggagccgttatcaccttgtttttcggcattcagattcccgtcctcggccggttcacactaccggttgtcagcatcgccgcagccattgcggtcatggcggcggttctgtttttcagccgcctcgttcatgcgtcgatgtcggtttcgacgctcattttgacaggcatcatcatgaattcttttctcggggctctcatatcgcttgtgatcgctttaacgggcaatgatctgctcccgattgtccgctggctgttaggaagcgtgtcaatgaggggctggggctatgtcgcgctgtttctgcctttttttctggccgggacggcgcttctgcttatcaatggcagagaattaaacattatgacttatggagaagaaaaggcaaggctgttaggcgtcagtacgggaaaaagaaaatggctgatgatcgccgccggatctctgctgacgggaggagcggttgccgtctcggggacgatcggatttgtcggccttgtcattccccacgtgacacggcttttgtgggggacggatcatcgccatttactgccgctgtcagcattgacgggcgccgggtttctcattttggcggatttgttttcccgcaccgtcattgagcctgtcgaattgccgatcggcattatgacggctttggcgggagcgcctgtgtttgccttgattctgcttcgccagcatcatggagggaaacgcttatgatcagggtgagcagcctgtccggcgggtacggaggccggatgattgtagaagatgtcagctttaccgccggaaaaggtgaatttgtcggcatactcggtccgaacggctcgggaaaaacaacgctgatgaaattgctgacgggaatgctctctccgtcaaaaggcgaggtgctcgtagcaggcaggcccgtcggcggatacaagccgcgggaacttgcgaaaatcatggccgttttgccgcagcatacggagcaagcttttacatttaccgttaaggaaacagtgtccttcggcagatatccgtatcaaaaaggactcttcagacagatggatcaacatgacgaagacattgtccgggaagcgatggaaatgacgggcatcgaccgatatgcgcagcaatccgtccgcaatctgagcggcggggagcggcagcgcgtctttctggcgcaggcgctggctcagcagcctgaggtgctgtgtctggatgagccgacgacctttcttgatctcaaatatcagaaagacctgcttgatacggtgaagcggttgacgagagaaagaggcctgacggtcatcagtatttttcacgacctaaacgccgcaggccaatattgtgatcagctcctgatgatgaaagacggacgcgcttttccgaagcagacgccggatcaggctttgaaaaaagagacgattgaagacatttacggcatcaccgtcagcgctgttgcccagcaatcgtcaccgaaaccgctgatcgctttcatgccggaagcgcaggaggaaagagagcctgtcaacgttccgttcgcctctctgataaacaaaagcggaaataccgtaacgcttcatacagaacggccgttcagaatgttgtcaaccgcatctgacggcccgggcttttcgtggagccgccggctttccggctcagcggccgctggtttgatctgccgtacgtttgattcggtcacaattgccgtgactgcgcagcataccgtttgggtgctgatcagcggacgtttatcggaacagggatttgtacggctgttaacggcagcggctgaagcgagaatgcaggctctttccggcagacaggcaaaaggcgacattgtcatttgcgccttgcagacaggagaggcgatggatgtccctcacgcggaaagagccgtcagaagaggaaccgcggcatgtgtaaaagcggcggaagaaggaggaatacaacgatgaagctgtatacgaaaaccggtgataaaggacagacaagcctgatcggcggcagaacggataaagacagtctgcgggttgaaagctacgggacgattgatgagctgaacagctttatcgggcttgcgcttgcggagcttgatgattgtgagaattgcggtgatgtgaaagccgaactccgaaacattcagcatgagctgtttgactgcggcggcgacttggcgacggtcactgaacatagaagctatacattaagagagacatctatttccgcattggaagactgcatagaccgttacacggctgaagcgcccccgcttgagaaatttattcttccgggcgggcataaggcggctgctcagcttcacatcgcgcggaccgtcacgagacgggctgagcgtctcatcgtgaaactcggcaaaacagaagagataaacgatacggtgatgcgttacttgaaccgcctgtctgattattttttcgcggcggcaagagcggttaacgcaagacagggcgttcaggatatagaatatgaaagaagcgccgcggtattccgtgatgatgaataatgttttgttcagccggcatcagcaagccggctgtttttttatagagatatccatcaattgaacctttattgacaggaggaaaatgtatcttatgcattattgactgaaaaattaaaaaatgagatattataagaaacattgtaaaataatgggggatttgatagatggatacatataataagagcgagagcatctggaataaaaatttcacccttctgtttatctcaaggctagttaaattgtcaggcgacggttttgcctttaattccattctgtggtttttgatttttgacggggaaggcgcgatcggcacgtccctgctcattgcggtcacgttccttccggaggcgatgctggcgccgattaccgggccttttatgaagcagcatacgctgaaattctggatgtatttctccgacctgacgcgcgcggcggtcgtgttgatcattccggtctgttactttaacggtttttctcctttatggtttgtcatgcttcttatgattgtgcattcagccacgggagccgcttataatcctgcatctatctcattaatccccaatattgtcagagaaaacagcctgcagaaagcgaatgcggtcatccagtcatcaggccagatcgtcaggcttgccgccattacgctgagcggggtgttcttaacatttatcagtcccgcttattctttgtttatcgctctcatattctatcttctatcaggttttctcgtactctttatgtcataccaagtccagcatgccaaacaggatacagtcgccgtcagacagcgcgggacgtatttcggaaggctcaaacggggtttcgttcttgtcaggaaacaccagattttatacccgctcgccatctattgtatcttcatgaattttgcggccgctccgtgggaggcgctctctgccgtttatgtcgccgaagatttaaacatgccgccgattatctactcgcttttgaaagcgacaggcacgggcggagcctttttaatgggttttattttggctaaggtgaaggtgaacaaatacggtctcctgtttgtgtcagcgggaatcatagaaggagcggcatttttcatcaccggcctcaacacttttctgccgctcgtcttcctcgccgcgtttgcgttcggatctgccgtcagcgcgattaatgtgccggaatatacgattattcagacgtctgtggaccatgatgaccagccgcaagtctatgccgtcatccatatgatctcaaacatatccattccgctcggcgcggttctttgcggatacgcggctaacgccttcggtcccggaaaagtcattgccgccggcggtctcgttgaagtcctgtccggtctcggaatattgttctttacgaagctggccaaagccgaacgctcagatctcatcagggaaaaagaagcgagcatcagaatatagatttttcgtgaaacgccctgcgccgtccggtgcagcggcgtttttttatgcgaaggtccgggggcttatacgactccggtctgatatgaaaatcaatctctgactcgttttgccggccgcgggatttgtttatagtaaagacaaggaaaacgaaaggaggatctgcatgaatataaatggcaaaacggcaggcggctttctgctgattgtgttcggactttctgtctttttcggaggaggccatttcgcatttatcatcccgctggcgatcggaggcctgatgctttactggggaatcaaacgtttttcaaaaggccgggcggtatcgggtatcatcgcgggcgtcatcggagctatgattctcgtcggttctcttccatttatcgttgcgatcggactggccggcgccatggtgtatttcgggtggaagatgatgaagcagggcggctcagataccgcttcccgccagtatgaaccggaagcggcatcaccgggctatcaatccggatttgactctgaatgggaagaatttctgaagaaaaaataaggaggaagacaaaatggtcttaaaaagaataagaaatatgttcgtcgcatctgttaacgaagggcttgataaattagaaaatccgaaagtcatgctgaatcaatatgtgcgtgatatggaaagtgacatcgctaaggcgaaacaaacgattgtcaaacagcatacgatcgtccatcagtttaagaaaaaacaggaagacgcctccgaaacggcggcaaaacggaaaaaccaggctcagcttgcttttgatgccggggaagaggagctggcgaaaaaggcgctgactgaaatgaaataccttgagggaaaagcggccgaacatgaaaaagcgtatgagcaggcgaaaacacagctggcagagctgaaagagcagctggaaactttagaaacgcgcctccgcgacgtaaaggataaaaaacaggcgctcatcgcccgcgcaaacgcggcaaatgcgaaggaacatatgaacgcttctttcgacaaaattgacagcgaaagcgcctacagagagttccttcgaatggaaagccgcattgaagaaatggaagtccgcgtcaaatacggcacttcagctgaggcgaacacagaatacagccgctcccaatattcagacgaggtggaagctgagattgaaaaaatgcgctcgctttctctggaaaaaacagagcgtcaaaaagcggctcatgaataatgtgcacaagggaagatcggcgcgtttacgcctcttccctatacgcacgtatcaattatccggcttttcctttataataaaatgaatgaaaaaggatggaacgtaatgaagcgtaagattgccaaaggactgatggcggcgtccgttctgatctgctgtctgtttttggtgaaagaagtgtttgccgggcgtttttttccgttgtgcgaaacagaagcggaatcggcaagcataccgccgcgtgccgtcaacagcctgtcggtttcatcggaacagacggatgtaaaaatcatcgcggaagcgcggaatgatatcgcggcaaacatgacgggatcggcggggaaaatgtttgtccaaaacaggggaaagaccctcaatctcaaagcgaaggagaaagggttccaatttctgaatctctttcagcgccctctgctgattgtccgcattccgtatgattatcatcgggatatcaccgtccatacatcaagcggcagcattgccgtcgacggaaacaaggggctgtctcttgcgcacctcggcgtccgttctgtaagcgggaacatgtcgctgaagcacgtgaagacggatgtgtttgaagcgaaggggctgtcgggcaatctcacagcagcaggccttgcggcaaaaacgggggctgtccgtttatcctcgggacatgtcgggcttcaacatgtggcgggcgcccttgacgtgcgggtcgcttctggcagtgtcgatgcctcgcttgagacggcggatgctcccgtatccgtcaggcttgcgagcggcagcgcagcgatcagcctgccgaaagacggaagttttacggtgaacgccgagacggcaagcggaaggattcggccgtcttattcctttgagaaaacgagtaaggaaggcggggcatttaccggcatgaaaggcagcggcgccaggccgattgatataaaagtgacgagcggcaatattgcactgcaatagtcaaggaaaggaggggcaagcagctgatggcaaaaaaacagattctcggacttatcatcgccttattaggtgtcagcatgtttttgcgtattatcggcatcggcgacttcttgttttggccgctcttttttctgatcacaggttatatttttaataaatattcccgcggctggctcggctccgtcctgtatatcttcgccgcttttttatttttgaggaacctgttcagcgccacctttaacctgttcggctatgccttcgccgcctttctcatatacgcgggctacaggctcctgaaaggaaagcgcgtgtatgaacataaagagaagaaaatcaatcttgaaaaagaagagcagccaaagccttccgcccagacggaaagcagacagccggacctccgcagcttttttatcggcgagctccggatgatgaaggacccgtttgagctgaatgatttaaatgtttccggattcatcggcgatgtgaaaattgatttgtcaaaagcgatgattcccgaaggagaaagcacgatgaccatcagcggtgtcatcggcaatgtcgatgtgtacgtcccgccggatatcgaagtgtccgtcagttcatcggcttttatcggcgatatgaacctgctcggctctaagaaaagcggcatgagcccgaatctgtataaagtatcgtctgagtacggcgactcgccgcggcggattaaaatttcaatttcgttattcatcggcgatgtggatgtgaagtatttatgaggaaaaaattactcgccaatattcagtggcgcgccatgcggatgaccgcgggactcagtctgctcctttgcgcggtgtttattacgctgatgctgctgtattacgggcttgacccgatgctgctgttttcttccggctggttcggtattccgtttgtggtcatcctgcttttggcgtctctttcggcggggttgatttccggttatgtatatggcggccgcctgaaaacaagaatggatacactgattgaagcggttttgaaatttgaaaacggcaattttgcttatcgggtgccgccgctcggcgatgatgaaatcggtctggcggcagaccaactcaacgaaatggccaagcgggtcgagctccaggttacatcgctgcaaaagctctccaacgaacgggcggaatggcaggatcaaatgaaaaaatcggtcatcactgaagaacgccagcggctggcgcgcgatctgcacgatgccgtcagccagcagctctttgccatttctatgatgacatccgccgtcttagagcaggtgaaagatgcggatgacaaaatcgtcaaacggattcgcatggttgaacatatggcgggggaagcgcaaaacgagatgagagcgctgctattgcatttgcggcccgtcactttagaaggaaaaggcttaaaagaagggctgattgagctgttaaaagagttcaaagcgaagcagccgctggatattgactgggacatcagcgatacgggtgtgtcaaaaggcgttgaagaccatctgttccgcatcgtgcaggaggcgctttccaacgttttcagacattcaaaggcgaccaaggtcaccgtcaggctcggcgcgaaacatcaaaagctgcagcttaaagtcattgataatggggcgggttttacgatggatcaagtgaaagcatcctcatacggcctgcattccatcaaggaaagagcgagtgaaatcggcggcatagcggaaattatctctgtaaagggaaaaggcacgcagatcgacgtgaaagtcccgatttatcagaaaacaaaaggagagaacgacagtgattcgagtgttactgattgatgatcatgaaatggtcaggatgggtctggccgcatttttagaagcacagccggacattgaagtcgccggtgaagcatcagacgggcagcagggcgtcgatctggccgcaaagcttttgccggatgtgattttaatggacctcgtcatggacggcatggacggtatcgaagcgacaaaacagatctgcgcgacactcaatgacccgaaaatcatcgtgctgacgagctttattgatgacgacaaagtgtatccggtgatcgaagcgggagcgctcagctatttgctgaaaacgtccaaggcggcagaaatagccgaagccatcagagcggctgccaagggcgaaccgaagcttgaatcgaaggtggcgggaaaagtgctgtcaaggctgcgccattcagagaatcagcttccgcatgaaacgctgacaaaaagagaactggaaatcctctgtctcgtcgcggaaggcaagacgaataaagagattggtgaagagctgttcattacgattaaaacggtgaaaacccacattacgaatatattgtcaaagcttgatgtcagtgaccgcacgcaggcagccgtatatgcccaccgcaatcatctcgtgacataagaaaaggagagcggtgccagcacactctcccgaggaacggggtcattgggacattccctttgttccgaaatccctgatggcgactttgactttgtattcaatatccgattcactgaagtgatgatcccagtcagaggatatctttttccatttatcgggataatgaatccggacttgatcgcctaacccggtaatatccactttcaactcatgctgcatgtaatcaatgaatgccatgacatctgaatgaatgctgcgttttaccgcgtttttgatttcatttatataggactccttgaaggaatcttctttcgggttccaatcctcagatagacggccttcaacaaaccgggtaacgataaacttgaattttccgtttttatattgtgtttttacatcatatttgctggaaaatacctcgaaagacaaataataattgtcatgctttgcaaacgtaacgcctccctttaccgtgcctgtgaacaggttcatattctggacttgtaaaggagttagattcgcataccagaatttatttttaataatggtagcgccccagatttccagtctgctgcccactttgcgaacttgaggaagggcaaaggtctcgcccttggcgattctctcggatatttcccccaatgtcacgggctccatcatccggatggtgaccgcattattctccgttaagtcatagatcgtatttgacgcaggctctccctggtcactgattttgaaaatatctttcgttttatccggcaccgtcatcacattgcagcttcttctcgtaccgttgtccctgataaattggttcatcaatgcgtcaagcgggatgtcgtcctttaacagcgcctcggaaaacagcatgatacgcaagtgctgggagaaagcggggtgattttttaatgatgccgttcgtaaggcttgatggacggtttctccggaagtggaagtcacctttgtcgtgtcgctccctgacgacgactgctgggaacttgctttttgcggaaccagaatctgctgcgtcacttccacgttttcttcctcgggtttatcgagcccgacgccgataacgagactcaaatcttctatattgcggctgtcccagcatccggccaaaagcaatgtgcaaagaatgattacgatatatttcttcattgcgcttttttcaccttccttttcacagcgacgactgcaaacatcagtaaaggcagcaaaaagaaaaccaagaagatatagccgagaatatcactgaacagcatcagcttgttagcgtcttttggcatcaatgatccgaagaatgtcgcaatgcctacgaaaatgatgccctttttgtgcttcagcccgaaaattttattaagacccgatgtcgcgaaatatccgtacgatacataggtggcgaaaaattggataatccagacggcaagcaaaaaagactcgaatctttcgataaaaagccctttgatttcaaatgattgaaaaagcgcaatcgtaggccagatcattgttttgacatcctgggtggttaaggcgccgacgacgagcacgtaggtaatgatgtataaaataatcgggatgccaaagcccatggccgacatacggaacgtgtgctttttatttttgatgtgctcagggagaaacagcataatctcaattcctaagaatgaaacagaaacgacggtcaaggaagccataacgggagaaaacccctgtccgagcaccggccgcaggttgtccagatcaaatattttaaagctgaaagaaaacaccaccagcaaaataatgatcgtaatcgttaaatagaaaggaaagagcctgccgagatcgctcatgccgccgataattaaataaacggaacaggcgataaagataaacagcgtaaccggcacgggcgttctctccaataaaaagaacttgaccatttccgccatcgcccgggcttcgaagctggcgactcctataaaatagagacagatcataagattgacgatatttcccgcccatttgccgaggccttcgttcatataatcaaacaatgatccgtactgatgctttttcataatgagcgtattgagataaatcaaaaagataaagatgaagccttccagacataatgcaatccagccgtccggcgaattcgcccttgatgacagcgaccgcggcatggtaaggagtcccgccccgagcatcgtgttggaaatcaatgccgtcccttgatagcttgtaagcttattgagagttgttttctggctcatttacgtttttcgcctcttttggttgatttttaatagggagacggagaatagagtcgtttgcgttttttaagctgaaaaatccattcggcgagaaatacggagaaccgaagcttcgctgtctcgataaatgagtgtagatcgccagcataaataaaatcatgccgtacagcccgaaagctgcggcggtaaacatcgaaatgaaacggagcacacggaatgacagacccatcccgtactgcggcaccgtaaatgaagcaagcgcgacaatgctgaccacgatgaccatgatggagctgacaatattcgcttcaacggccgcctggccgatgacgactccgcccaccaatccgatcgtctggccgagcgggctgggaagcctcaagcccgcttctctcagcagctctatcgtaatttccattaccatcgcttcaatgataggcgggaagggaacgttttctctgttcgccgcgatggtgactgcaagcgatgtcggcagcagcccttggtgaaacgaaacgagggcgatataaatggacgaaaaaaacagcgtaataaaaatagacgtaaaccgcagcacccggatgagcgaggcggaaatccaccgttcataataatcatcgggagactgcattaaaattcctaaagaagccggaaccaccagcgcaaacggcgagttgtcgacaaggatggcgacgcggccgttgaacaaggcggaagagactttatcaggccgttccgtattttgtatttgcggaaagggcgaatacttattatcctcaataagctcctcaagcgttccggaatcctgaatgtcgtccatcttcacttcgctgaggcgctttacaacatcgctgacgacagatgggtccgccttatcatctatgtacatgaccgtggcgtattttaacttattttctccgatcggaacctttttcgttttcagcttcggatggttcgtgcgctgcctgatcatggcgacgtttgtatcagaatcttctatgaaggcgattttcggacctcttacgaccttttcggatgtgggttcattcacgcttcttttttctctttttcccgtggacaaaatgtatacgctgtcaagtccgttaataaataaggcgcattttccccgcagaatggagatgacggcttccttcgacgtaaagacgggacgggcgtcaatcttatcaagacgtttcgacaccgtatccagcgtcagagtgtcttcttcccgaagcagcgtttcaatcgcttcttttattttgtcttcatcgttcatttcactcagatacatataataaaaaacaagcccgttcggaagcatctttttattttgaaccaggtcatcattctgctctacgtggggaagcaccagtgccaggttaacgtgtatgtattccttgaattccgattgcgccaacgacagtcacccgccttccaatccttaattgaggttatcttttcctgttaaaaaaatgatatactatgataaagtatttaatggtacaagtttttttatgaaagcggaggagagatgtggcacaagtcagactggcaggaaatgccgaagaaattgaacagctcatcaaatcatttgaggcgcattacgaagtggcttacacgtcgaaagaataccgtaaaacaaatccgaagtataaatactctaaggattcgcgcgtctatcttgagctgaaattaaaaacggccaaggccgaaaaataaaaagggtttcatctgttactggcgaataatactcagggtgaagcaactgttatggagggatacataaatggactacagaattgaaaaagacaccatgggagaagttaaagttccggcagataaattttggggcgctcagacacagcgcagcaaagagaacttcaaaatcggttcagaaaaaatgcctcagcgtgttgtgaaggcgtttgcaatattgaaaagaagtacagcgatcgccaacgaacgcctcggcaacttagagtctgaaaaagcacaggcgattgccgctgtatgtgacgatgttttaaacggcaaatacgacgataactttccgctcgttgtctggcagacgggaagcggcacgcaaagcaacatgaacatgaatgaagtggtggccaaccgcgcgactgctttattgaaagaaaaaaattccgagctgaagattcatccgaatgatgacgttaaccgcagccaaagctcaaacgatacattcccgacggcgatgcacgttgcggcggttcttgccgtatatgagcagctcgttccggcgcttgatcagctgcgcgcgacgcttgatgaaaaagcgaaagcttatcaggatattgtgaaaatcggacgcacgcatttgcaggacgccactccgctgacgctcggacaggaaatcagcggctgggtatacatgcttgaccgttcgaaagaaatgattcttgagtcaacggaaaaaatccgcgcgcttgccatcggaggcacggcagtcggcacgggaatcaacgcccatccgcagttcggtgaattcgtcgcggaagaaatcacaaaagtaacggggcagacattcaagagttcgcctaacaaattccacgcgctcacaagccatgatgaaatcactcacgttcacggcgcgttaaaagcattggctgccgacctgatgaagattgccaacgatgtcagatggctggcaagcggcccgcgctgcggaatcggcgaaatcgtcattcctgaaaatgagccgggaagctctatcatgccgggcaaagtcaacccgacgcaaagtgaggcgctgacaatgatcgccgcgcaagtgatgggaaatgacgcgacaatcggatttgcggccagccaaggaaacttcgagctgaatgtcttcaaaccggttattatctataacttcctgcagaccgtgcagctgctcagtgacggaatgaattccttccatgacaaatgcgctgtcggtattgagccgaaccaagagacgattcaggaaaatctctctaactcattaatgcttgttacggcgcttaacccgcacatcggttatgaaaacgccgcgaaaatcgccaagcttgcccacaaagaaggcctgacgctgaaagaagcggcattacagctgaaccttctgacagaagaacaatttaatgaaatggtgcgtccggaagatatggtgcacccgaaagcataaaaagaaagaacggctgcagtcattgcggccgttcttctaaataaactgctgtttcagtaaaaatctgagctgttctgcatcttcagccagcaggtcggattccttcaaattcaaaatcattcctttgatgattgccggtttcggcgactttttcttcatttccgcttccagaatatccaagctctcggtgaattcagatgcttgcgtcttatccatcgtgccgatgcgcgtgcggagggtctgcaagatcgattggcttaaaggatcgggctgcccgttatgaaggggcccaaacagtgagcttgcctcatcaagagaaataaacgcttcatcatgtctgtccgccattccgtttacgatgtcatcaattctgtgaatcacggtatttgccaaaagcgaaggctgtacggaccggccggtcagaatgagatattcaagatacatctgactgattccttctattaaaaaacaaagctcggctgtgtatggttcagctttttctccgtaaatcgcaagaagactgtcgatatgaaactgcaggatcgaccggcggattctctttccgcactgcgccgcttcttcggtataaggaagtgaaccgtctttcatctgcacggtaataaaatcctgatgggcgagaatcgattcgtaaaacaccgcaagctgtttttggtaagcggctctcggactgtcaccctccgtttggatcgtcgtgattcgggtaaacgttttatcatagtagtaattcagcatggataggagcagtgcttctttggaaggaaagtaaagataaaaagcgccttttgagattttgcattcatcggcgatttcctgaaccgatgtagatttgtacccttttcgggcaaacagtttgattgctgcttcaatgatcagcttttctttttccttcaatggttccaccctttcggagccaggaggctggcttgtgcttctcatgtatgactatatggtcatattgatattccgtaaatttaacctgattgtaacttgtttttttgttttgttttatttatattataaagtgagctgaccgaatggtcaaagttctggcgaaagggtgaatctgaaaatgaaagaattagatgaaatgatcagccgcttgcgaaacagaggaattaaagtcgaaaaggtgaaatatccgaaaaagacaatttgtgaaaagaaatgggttcatcaatgccaaaaaccgctgaaagcaaactacagagattttaacggctattccttcacataaaaaaagactgcaatggaacactacagtctactttggtatgataattcggtagattacacccgattggtcattttcaattgaaattgatgctttatgcaaggttaaaatccgttttacgatgctgagtcctatgccgaactcgcctttcttccctttattaaaaggctcgtacaagctggatagcatctcatcctcaatcggaggcccgtcattttcaaccgtcatgacaatctgctgctgattttggctgatccgaatgtgaatcgccgtttctgcatagcggatttgattttcgagaatgttttcaagaagtttgctccattgttccggatcaccaggcatcattaatgcatcttctgtatcaacggtccacgataattccttccgggcccatttgagccgttcaatgacttcttccgtgaccttcacaatgtcaaatgtctcatggtgcacccgctgcttcattaaataatcaagcttcgttaaatataataaatccttaattttcttctcaagtttttctgcttcgccttcaatgacatcaattgtggtttccagatcccccttaggaaaaatcccgtcctttattgattgagtatagccccttatcaccatgacaggcgtttttaaatcatgagagatattttgcaggagcgttctttccgtttcgtctttttgcaccagcttgctccgcatgtcttcaatggtatggcctaattttccgatttcgtcttttctgtcgacgatgaccggatcatcccaatcctgttttgaaatccgtttgacatgcttctctaaggaaacgagcgggcgcgagagatatttggcaagccaaatcgccggaatccagcttaacaaaatcacgccggcaatgataaagagcagctgcttgaacagggtgaatgccagatcatcacgataagaatcaagggcgtaagacagcatcatcgcatcctggccgttaatggtgaggccttttttaatgacgaaaaacactttttcaccgctgatgtccgcgctgtatcgtttcgtgacgctgtgctggcggcccgcgagcttgtacaccttatggataaaggaagaagaaaagtagttcaagtctttgtcactggccgactcctcccgttccggcagaagaacgtgctgaacggatcggaaagtcgtcggcgcggtcgcatcctcgctgtaatatccccgctcgatcgatccgggcagccggtactccgtcagtacatgctgttcattttcaatggtcgtatacgtttcatccgtgaaaaaattacgcagcgtatttgagaacagcacgagaagcagaatcgaaatggctaagaggatgcctgagatgaccacccatatttgaaaagcaagcggcttatttttcatgacgtcatcatcctgtagccgaatccgtaaatggtttcaacctttaacccgggcatttttttccgcagcctccgcacaagatcatcgaccacccggtcagtgccgaaataatcatggccccatatattcagcaggatatcttctctggaaaaggggtgtcctttatggtgaagaaataaaagcagcagatcaaattccttagacgtcaaattgaccaggctgccggtttcatcataaacctctcgggcatcttcgatcacattgtaggaagaaacggtgatgccggttttctttgcggcgggctgttctttatacacgagctcgagcagcttctggacccgtataataagttctctcggcaaaaaaggcttggcgatataatcattgcttccaagctctaacccgaggactctgtcaatatcggcatcccgcgcggaaatgaaaataaccggcacatcgggatctttttcttttatttcttttatcaatgtatagccgtccgtatccggaagcatgatgtcaagaatccacaagtggggagacggctgcatctgctttctggcatcttcgccttttgtgaaagatgtaatgttccagccttcattctctaaatattttgtgagcagttcattcaggttatcctcatcttcaactagataaatggtgtatgacaaggcatttcacatcctttcaacgtcattatactagttttaacatactcaagccgcattttcataatttcacatattcttttcatttttatcccacaatgtttgtttatgatgtgtataagggaagaaaggaagaaaaaaagcggggaagataacatgttcaaacacattttgttttggagctttgcttttctccttattattgggacaatagaacttgtacatgcgatgaatatgtaatcgatagaatgaaaacatgctgaaggagtgtgcgtgaatatgaacgatcatcgagatgacggcagaagccgcgatcagtcagatctttcacatacggaacaaaacagaaatgaacagcagcagatcagccatcaggagcccgagctgctcgaaggcccagtctcgaaagaagcggaaaacgagacggcggccggtacggaatttgaaaaaacggctgccgtgaaaaaagaaaaaaaacggagagccgcttggctgagcccgattttaggcggcattatcggcggaggcctcgtgcttggcattgtgccgaatctgccgagtgagcagcataagacagaagccgtttctgatacgaaacaagttcagtcttcgaattttaggtcaacgcctttgaaaaatacctcaagcgtagcggatatggtagaagatttggagcccgcgattgtgggagtgtccaactaccaagcttcgcaaagcagccagttcagacttgacggcggttcaagctctgaaacggaaagcggcacggggtcaggcgtcatcttcaaaaaagacggcgaaaaagcgtacatcattacaaacaaccatgtcgtagaaggtgcgaacaaactgtcggtcactctttacaatgggaaaaccgaaacggcaaagcttgtcggaaaggatgccatcagtgacttggctgtattggaaatcagctcgtccaatgtcaaaaaagcggccagcttcggggattcctccaagctccgcattgccgataaagtgattgccatcggcaacccgctcggccagcagttttccggcaccgtcacacaaggtgtcatcagcgggctgaacagaacggtagacgccgatacatcccaaggcacggtggaaatgaacgtgattcagacggatgcggcgattaaccccggaaacagcggcggcccgttaatcaactcaagcggccaagttatcgggatcaacagcatgaaagtcagtgaaaacggcgtggagtcactcggctttgccattccgagcaatgatgtagaaccgatagtcgaccagctgcttgcaaaaggaaaagtcgagcgcccatttttaggtgtgcagatgattgacatggcgcaagtgccggaaacttatcaggaaaacacgctcggactgttcggcgaccagctgtctaagggtgtttacgtaaaagaagtgcaatccggctcaccggctgcgaaagcgggcatcaaatcaaatgacgtcattgtacaattgaacggcaaagatgtcggcagcagcgccgatatcagacagatcttatataaccagctgaaaatcggcgataaaacgactgttcaagttctcagaaacggaagcaaaaagacgctgaacgtcacattaacgaaacaaaccgaaagcgcaagctgaacgcataaaaaaagctgaaccttcaactgaggttcagcttttttcgtcattctcccaagtaggctgacagcatccacacatgcttgtccgcttcttcaactaatccgacaaacaggtcggcagttgacgggtcattttgttcctcggcgatgccgatgacaaattttgattcgcggctgatttgtttatagtcttgaaccagtgattccaccatttcagaagccgttttttcctggccttcatccgtaatggaagcttgttcaaggtaagtgtgtaaagtcgccgcaggctgtccgccgatggccagaagtcgctctgcgatggcatccgccgtttccgccgcttcgttatatagctcttcaaatttttcatgaagcgtaaagaaatgagggccttttacataccaatggaagcggtgcagtttagagtaaaggataaaccagtttgataattgtgtgttcattgatttctcaacaagagtttcagtttttttcgcgttttgtgtattcatattcatcgtcctccctgtgatctgataatttaattatatcacatattaaataaaaatcaatactaaattataataattataatttaggtttaagtgaacagctttttctttataatcgattcccaggcggaccacggaaagagtgagcggaaagccaatgtcagcttaacgcccctgccgatcggataccgcagtttcttcagccgtttcctttgtgccaattgataaatcagctccgctacgtcatcaggatcgccgcttttggatgcgttggctttgaagtaagcttctatttgctgataatagcggtaataaggcgaatctttgccgggtgccgtaagatgattggagagagacgtttcccatatagatgttttgtaggagcccggttctattaaagcggcatcaattcctaaaggcagcagttcgaggcgcaggctctctgtaaacccttcaaccgcgaatttggaagagacatacggagatagagccgggaaaccggtcagtccgctgatactgctgatattgaagattttcgccccgctatgttttcgcatataaggcagcacggtttttgtgacgtgaatcagaccgaatacatttgattcatactgctgtctgtaatgttccatcagcacatcgtcaataaaccccccgtacgcagtgccggcgttattgacgagcaggtcaatcggtccgaaaccgctgatggtgttcccgaagtcagacaccgactgctcatttgtcacatctaaagaaacgaccgtaacatgttcggatgcacccgcttgagcggcggcctctttcagtatttcagctttctccggctgtctggctgttgcgatgacgtgataagaccgggcgagcttcagcgctgtcagcagcccgaatccgctcgtcgcgccggttacaatggcaatttttctgttcatcttataatcctccccgtttgttcttatctcatagtgtataacatctcgcggaaagaaggagaaatcgttcggaaatatgtcagaattgttttataatggagtcagcttcggatagaaaggggtaaagaaaagatggcattagagggattgaaggaaacatgggatttaaactccatttttgagggcgggagccggtcggaagagtttcagcaatacatacaagagctcaaaaatcatctaagcgcttttcaacatgcggttgaagcgtttacagctccgacgcatgcggatgaaagccgggagctgatcaatctgattgataggtttgaacggtcagcgatcatgatcaggcaggcgggagcgttcgtcggctgtcttcaggctcagaacactcatgatcagaaagcgaatgaatggagggcgcggatcaatcagctgagcagtgattttaaatccgctctggtcacccttgacgatacacttgcccggattgacgagccggtctgggaggagctgctgcaaaaaccggaacttcaggatctcacatatgttttaaatgaaagaagagaccgggtcaaagagaagctcagcgcttcagaagaaaggctgattgaaggcctggccgttgacggctatcacgcatggggcgacctgtataatgcggctgtcggcagaatgaagattccgtttgaggataaagagctgtcggtcggccaagcggaaaatatgatggcgcacccggaccgccgcatcagacatcaagtgttcaaagagcttaatgaagcgtggaaaggagaagaggagcttttcggcagcacgctgaaccatctggccggcttccgcacggaaatctataaagcgcggggctggaaaagcgctttggaagagccgcttgcgatcaaccggatgaaaaaagaaacgctggatgtcatgtggcaggtcattaccgatcataaaaagccttttgccgaatacctgaatcgaaaggcgtctcttttagggcttgagcggctgaactggtatgatgtggacgcgccgatcggcgaggctccgaaagaatatacatatgatgaagcggccaatctgatcgtcagccaattttcgacgtttggcaaaaagctgtccgcatttacggaaaaagcgttccgtgatcggtggatagaagcggaagaccgcagcggcaaacgggtcggcggtttctgcaccagctttcccgacagcggagaatcccggatttttatgacgttttccggaagcgcttcgaatgtatcgacgctggcgcatgagctcggtcacgcgttccatcaggaggccatgcttcaagtgcggcagctgaacagagcctacgctatgaatgtcgctgaaacagcctcgacctttgcggaaatgatcgtcgccgacgccgctttgaaacaagcggagacaaaggatgaaaaggtgttcttgcttgaagataaaattcaaagaagcgtagccatgtttatgaatattcatgcgagatttttatttgaaacgcgtttttatgaagagcgcaagcagggcgtcgttccggctgagaaactgaatgaactgatggaagcggcgcagaaagaagcattttgcgattcattaggggaataccaccctcatttctgggcgtcaaaactgcattttcatattacgggagtgccgttttacaactttccgtatacgttcggttatttattttcgcttggaatatatgcaagagctcttcgggaaaaagcggattttgaagaaaaatatatcgcgcttttgtgtgacacggcttcgatgactgttgaggatttggcgatgaagcaccttggagcggatctgacggaacggtcgttttgggaagacgcggtccgccttgccgtacaggatgtgcaggaatttttagagctgactgaatgataatctggagatgaaccggccggagtgttaccgctccggctcttttttgtttaatgaatgacagccgcctcccttggaaatacctaaaaacgatcggaatggaatgggagtgaatcgcatgaaatggatcagaacggcgggcgttttatgtcttacgctgatgctgattgccggctgccgattgaatgaagaaaaacgggaagcggaacaagacagcacacccgtgtcatccgcgaagccggttccttacagcagctttgcccttcgcgtcagctacggagccggagagcataaccgctatgaaggtttgtatgagagaaaaggcggtcatgaaaaggctgacatccgggacaagctctcaggggttcacagagagggcgaggaagcgcttgatgaaatgaagatgatccttggagaacttgccgtaaacagccggatgaaggaaagtgaggtcgtccggcaggtgctctcggcttttaatttggacagccgctatgaccatttttatctgaaactgaaaaagaatgatggagaaatgacggaaataaaaaaataaccgccgtccgctgcttttttgcccaaaactaattgataatgatattcagagtcattaatttctgttacaatataatcatgatctcacgttgaatgtttaggcaatttgtttatatacatagtgttgggaaactcaaaaaaggagcggttagcggtatgagtgcaatttctacagagacgctgagcttagggtacggagagactgttatcattgacgaattggatgtcgcgattccaaaaggcgaaatcactgtattgatcggaagcaacggctgcggaaaatcgacgcttttacgttcattggcccggctgatgaaaccgaggggcggtactgtgcttttagaaggaaaagccatcgctaagcttccgacgaaggaagtggcaagagagctcgctattttgccgcagagtccgtcagctcccgaaggcctgacggtgcatcagcttgtgaagcagggaagatacccttatcaaagctggctgaagcaatggtccaaagaggacgaagacgcagtggcaaaagcgcttaaagcgacgaagcttgaggaaatggccgaccgtccggtggattccttgtcaggcggacagcgccagcgcgcatggattgcgatgacactcgctcaggatacggatatcattctgcttgacgagccgacaacctatctcgacatgacgcatcaaattgaaattcttgatttgctgtttgaattaaatgaaaaagaaaaacgcacaatcgtcatggtgctgcacgacctcaatctggcatgccgttatgcccattatctggtcgccattaaggataaacagatttacgcagagggccgtcccgaagaagtcatcacttgcgagcttgtacagcaggtctttgcgatgaactgccaggtaacgcaagacccgctgttcggcacgccgctttgcattccgcacggacgcggcagatgtatcgtgcaggaagcggccctcaccgcccgattgtcataatcatgaaaaagggaagggaacggtatggaagagaaactgcagcagcagctggacggcctgcttgagaaatacacggaactattgcttggcgaaacaaacccggatgtaaaggaagaagtcaggcagtggattttgtatacacatatcgcaaaaagcatgcctccgctcgtcaaacattggaatcaatcctacccggacgccaaagagggcatcaaagctgcgatacagcatattaaacagctcaatgaagcacacagaaaaaaacaataaaaaagctttcggcatcaaagagaggtgccgaaagctttttttgctgaaaaggaatcaataaaggcgccgttcaattcatagcgaagaacattaatgtaactaatgcacccgtttgtttacgtatatttcttccgcttgctgaaccaagaaaaaaggaccgccgcagcaatccctttctctctttcctatatatcacatttcctttcggatacgtaataactcttcaaatgcttttatatttgtatcaaaattgggcactgtttgagattcctcggcacatttgacttgtgctacaaccaaatcatgaaaaggtgttgaaatgcccgtaccttctgccattttgggaataactccattaatataatcaatttcagttttgcgttttttctcaagatcctggagcatacttgctcttagcagcctagatggtgccatggctgacctaaaagtttggatacgttcaggaatatcattttcacttcttaattccaaagattctaaatcaaggccgcccattttcgcaaatttgacaccattggcgtgtccaaccttaatcgtctcatctgcgatatggactgcactaacaatgccgatttcatggtcaagaatgtctccgtattctccgtttaatgctgccgataaaccactgaatgcattattgataagtaattttgaccacttcgttccaactaaattatcggaaatatgtgttccgccgataaggtctaaaaccgatttaatacgctggattctttctgttgtttcaccatgtaattctccaatttgaaaagcgtactctttaaattgagtatactcagttgtaagtctggatacgcccggctcaataaacgtagcaccaaattcaacagaacctgcaataacacgttcatcaccaacgatcgaagcaactttctgttcaggtataccgttttgcaaggaacatactacactgtcatcctttaaaaaaggcagcaactctttaagaatggagtcattatataattgtttcgtcagaagtaatatgaaatcatacttgcctgacttgttttcaggggtaatggctttcacctttgcttgaaattccgttgtaccaactactttagcacctatttgatttaaggtatctacatgttctttgtatgaatcaatcaattcgacatccattccgccagcagacagatatgctccaacaatggttcctaaagaacctgctcctaaaactgcaattctcattgtcaacgctccttatttttcctctaagtagttataaaccggctgtgctgcatttaaggttaaatccgtaataatatgagatgctgaaacgacttctaatacaggcaaatctgcaagaggtgccagagcatgttcaaataattgaagccgcgccggtccagtccaggcacctttaacttctatattcgttatttgcgtccgcaccaaatcacaaacccttaaatcaccattgtaatcagtggcaatcttaaccataaaattaggtcggcaaatttcccttttcgctttttccttatccatttcgaaatgtttatatcccatagtcgcagttgccacacgaagactgccataatccaatgtgccaacaagagtatcagagtctatatacagcttaggggcacccaatttctttggatatgcagtaagttcccgtccgcttgcaatagccgggaaattgtcaacatacatagaatgtacataatctccttcttcaccattaaagctgacagggatgacttgtcctgcctctgtataggcaccaagtccggaaacatcgggcatccacatgacttcgaatttcactaaaggttcagtaatttgaagaggttccggcactgccgcacgtaaagctttttcatccgttcggtaaataatatttaaatattcacggttaacaaatttataatttgggataggataagcaggggctgttagtggcgtacttaaattttttgctatatctttcacatcaattttcattgaatgacaccctttccttttctttaactatgctattatcttacattcgcatttacatttaatccaatacataataaggtatatatatatttattgaaataaatgaggggggtgcagacagatggaattgctgcagctaaaatactttcagacagttgcctatactgaacatatttctaaagcagcagaacaattaaagattgcccagccttctttaagtctcactataaaaagacttgagaatgaactgggaacaaccttgtttgagagaaaaggcagaaatattaagctgagttcagcagggaaaattcttttaaaacatgtaaacaggatttttactgagattgaaaatgcacaaacggaaattcaattggaggaacatcaaatttctggcaccatcagaatatctatttccaatccaagattccttgcaggactgatgagtgaatatatcaaccgctctcctcaatcaaaaattctccaagcaatcggagttaaaagcgagatcataacaagtttaaaaaaaggggacattgatttaggaataacaggtcatccgattcaagatgaagagatagagagttgggtgctggtaaatgaagatattgttctggctttgccctcaaaccaccgatttacgggtaaaacagaaatttctttacgtcttgtcgccgatgaaccatttattacccttgctaataatgaagagtatagcggttttacagcctcgctttgtgagaaagctggtttcaccccaaatattgcatttgaggcagattctcatttactggtcgagattataaagctggatcaaggtgtggcgttgcttcctatttcagtttgcagaacattggggctgaattttataaaagtgactgatcactctgcttcatatccagtcggcttatcttggatgagacataagctattatcttcttcggtaagaaattttcgtgactttattatgtcgtactataaagataactatgaaatgtttaaggtttattaaagaattccatcactatttttttgaattttcaccccccatttccaatgaggcggaagactggtcattcccagatgatataaaaaaatcccgcggcatccgcgggatttttctttgttaaacggctttcgccttttcttcttgtttgcctgtctttttatttgtcagcttaattgatttaacaaacagcgtgaggatcaatccggcagcgataaaggccaggcctgtgaaaaacacgctgtgaagcgaatccatcagtgacgttttcaaaaccggcacgatatgggaagaaaatgcggccggaatctgcttaatcgattcctggctgaacaaggattgaagcagcccttcaggattcttgtcaatcatacctttaaactgggcggcaaaggcacttgcctgtttcgggagtgagtctaagtaaggcaccagtctgtcggttaaaaggcttcctgatctggcattcatgacagcgccgagcaccgtaatgccgaacgttcccccgatcatccggaaaaattggcttgaagaggtcacaacacccagctcttcttttgaaaacgtttcttgcagagcgagtgtgagaagcggcatgacgagccccattcccagaccgatcacggccatatagcatgtagccgcgagcttgcttgtatccagctgcaaagtcgttaataagaagaagccgacggccatgatcagcatgccgatcatgatttgcggtttaataccgatcttataaaccagctggcctccgataatacttgtgataatcatagataccatcatcggcgtcataatcgtgccggaagcggtggcgctgactccgataattccctgcataaagaaaggaacgaacgtaacggcgccgaacatgccgatactcatgaaaaagccgatcagattcagtacggtaaacgttctgtttttaaacaggtacatcggcagaatcggctcttttgctttgatttcagcgaaaatgaatccgacaatcccggcaagtgcaagcgcaaagagaccgagaatctgccaagagccccatgcgtaatcctttcctccgaagctgagcgcgaggaggaggctgacgattccgacgatcattgtgaaaatgccggcgatgtcaaagttaatcggcccggtctgttttctgccttgaagtcctcttgcgataaagatcacggctaaaattccgacaggcaggttgatatagaaaacccatttccaatttaatgagtcaacaatccagcccccgatttgcgggccgatcacggaagcaagcccgtaaatcgccccgaaaagcccttggaacttggcacgctgtttccctgtgaacaaatccccgatgacgatcatagccatcggcatcatgacaccgccgccgattccctgaagtccgcggaaaataatcagttccgtcatgttgctggccattccgcacagtgcggaagctcccataaaaatcaataaacctgatacatagacgacgcggcgccccaataaatctgcaagtttccccgcaatcggaacgatcgtcgtcgaagttaaaagatatgccgtggtcagccacgtcatcatgcttaatcccccgaggtcacccacgattttaggaatcgccgttcctacgatggtgccgtcaagggctgagaaaaacatggcgatgattaagccggttattaataatgtgcgttttggatctttcttttcaatgctcatgtttcggcagctcctcttttctattcgttttctttttgatcagccgcgtatttctcggctgcttccgctactttgcggatgatgttcacggactgaatcagttcatcgtcagtcagaacggataggtttcgcgccagtatcgctttccgtccttccacaacatcttcgaattttgtttcgccttttttggtgaggctgatgtcgatgacgcgtctgtcctgctggttatgtttgcggacgataagtcctttttgttcgaggcggtcggccatcagcgtcactgcactcggctttacctccatgcgttccgcaatttcggaaactttgcagctcccgtgttttttcaggctggctaaaacaaataattgggcaggcgtcacctcgtgttttgccatgctttccaccatttcaggctgtatgttttgcagcagcgtctgaagagatttctggatgtcagacacatattgatccgcgtttttcataactcctcctcatcttgttccttgggaaaataattaacattagttaaatataaataaggattaatgataagtcaatctttttgtgcaaaaataaaaaaaggattgatgcttgtcgaaaacatcaaatccttcttcgttttactgctggtagggagactgctgctgaatggtctgccggaacttctgatacgattgctgaagcttttgggtatcggctgcttcaatggaataccagccattttgaaacatcacatcgtataatcttctttgcgctttttgtgactcatcgaaaatcgcctgaatatcttgataaagagactcgtggctgaactcgtgcagggctgtgcaatatgaagccgtgatgtatttttccgtcgtcagcagctcattcaccaagtctctgtcattcatttgcgccgtattgggcacaggcgtttgcggattcgtgattttttggttttgctgttccatgtattgtcctcctattgcatatagcctgttgttgtctgtccgccttgatcggggttcaagcggcctaatatgtgctgataatgcttctcatgcatccggccgatctgatcaagctcttgttttaacgtctgattctggcagtgttccgccataaaatgcgcttttttcatggcaagcagattccagttcagcatgtcctcaagatacaaatggtctttcgttgagatgacggcaggcggcaagtttccgtgctgctcttggttgttcatttaaacgcctccttcaattctgttctttttagctttctctgcgatcggaaattcatacacgaataaaagaaaaaggagggagttcatccttgctgcggagcatatgtttatttttgtcgaaaaataaaatgcttacaaaattcgcccaggcttacggaatccgcttcggtgcgggaaggttcgttgcaggggaaacactcacggaagctgtgaaaacggtaaagcggctgaaccaaaaagggctgtcggcttcgattgattatctaggtgaatatgcgggttcagagaaggatgcgagaaggacggcggaagaatgtaaaaaagcaatcagggcgattgccgagaatcaactggattgtgagctgtcgctgaaattaacatccatcggtctggatatttccgagaagctcgcggaacagcatgtcagagacatattgacggaggcaaaagaacgctgcgtgcctgtaacgattgatatggaggactattcaagatgcagccgtacgcttgagctgtataagcggtgcaagccggatttcccgatgctcggcaccgtcattcaggcttatttgtaccgcgcagctgaagatatcagcggtctgatgccatacaagccgaggctcaggcttgtaaaaggcgcttataaagaatcggcggccgttgcattccctgataaaaaagcaaccgatcttcattttcagcagctgattaagctgcagcttttgagcggccatgaaacggcggtggcgacacatgatgatgacatcatttcttatacgaaaacactcatcagcgaacatcagattccccgggagcagtttgaattccaaatgctgtacggcatcagaacggagcgccagaaggagcttgccgaagaaggatacaggatgagggtgtatgtcccgtacggaaccgattggtacgggtacctgatgagaagaattgccgagcgcccggcaaatgcggcatttgtgctgaaagggatcttcaaaaaataacggctgctccaaaaagcagccgcagcatgttattccatgttgtcttttttatattgctgattttggctcgtccgtttgccgccgccgtatttttgtttcggtcccgcatttcctttcatgctggccgcgctcactgcggcagaagacggatcttttctccctcgcaccattcccttcacctccgggtttaagtttcccgcccgcgccatggaacatgcggaagcagaaaaatttaaaaaaattccatatttgctattgaagtcatcctgaaaatcttttaagatgaaagaagaaaagggtttcattttttttgccgaaaaaatgaatgactattcattcaaagttcaagggggatgactcatgcacaagtttataaagaaagcagccgttctcggatcaggcgtcatggggtccggaattgccgcgcacttggctaacatcggaattcccgtcctgctgcttgatattgtgccaaacgagctgacaaaggatgagatgaaaaaagggctgacattagaaagcccggaggtccgcagcagactgagccgatcggccatgcaaaagctgctgaagcaaaaaccggcgccgctgacttcggctgccaatctcgactatataacggcggggaatttggaagatgacgcagctcaattgaaggatgctgattggattattgaagtcgtcgtcgaaaatcttgacgtaaaaaaacagattttctcactcgttgatgaataccggaaaccgggaagcatcgtgtcgagcaatacgtccggtatctccgtcacaaaaatggcggaaggccgatctgccgattttaaagctcatttcttaggaacccatttctttaatccggcccgctacttaaagcttctggaaatcattccgattcaggaaacagatcctgacgtgctggagtttatgacttcatttgcagaaaacacgcttgggaaaggggtcgtcatcgcaaaagatacgcctaattttatcgccaaccgcatcggtacgtacggcctgttggtcacggtaagagaaatgctttcttccggctgccgcatcggcgaggtggacacggtgaccgggcctttgatcggcagaccgaaaagcgcgaccttcagaacccttgacgttgtggggcttgatactttcgcccatgtggcaaaaaatgtgtatgataaagccgacggcgctgaaaaagacatgtttaagcttcctgaatttatgaatgacatgctgaaaaacaattggctgggcagcaaatcaggccaaggtttttacaaaaaagaaggtaaaacaatatatgaactcgatccgctgaccatgacatacggtgagcgctcgaaaatgaagacacccgctttagaagccgccaaacaggcaaagggtgccaaaggcaaaatgaaagcgcttatatactctggtgaccgcgccggacgcctgctttggaatattacatcgcaaacactcttatactcagccaggcttttaggtgagatcgctgatgatatcaaagcgattgacgacgccatgaaatggggcttcggatgggagctcggcccgtttgagatgtgggatgccatcggcgtcagaaaatcagcggagcggctcgaagaagaaggcgcagcactccccggctgggtgaaagaaatgcttgatcagggccatgaaacattttatatgaaggaaaacggaacaccattttactattcagacggccaatacagggctgtgaaagaaaatccgaaacggatcagcctgcaaacgttaaaagaaacaaaaggcgttatcagtaaaaacagcggcgcaagtctgattgatctcggcgatgatgtcgcgctgctggaatttcatacgaaaagcaacgcgatcggcttagacattattcagatgattgacaatgcgcttgaggaaacggagcggaattataaaggtcttgtcatcggtaaccaaggcagacatttctgcgcgggggcaaaccttgcgatgattttgatggaagctcaggatgataacttcatggaagtcgattttgtcatccgccgttttcagcagacgatgctgaacatcaaatacagcgctaaacccgttgtcgcggcgccatttgggatgacactcggcggcggcacggaagtctgtctcccggcggcacgcgttcaggcggcgagcgaatcgtatatgggtctcgttgaaaccggcgtcggtcttattccgggcggcggaggaaacaaagagctgtacatgaattatttggacggcggaagtgaactgatggacgcagcgattaaaaccttcgaaacaatcgcgcttgccaaagtgtccggttcggcacacgaagcccgtgatatgcagattttgtccgcggctgaccgtgtcagcatgaatcaggatcacctgctgcacgatgcgaaacagctggctgcttccttatatgacagcggataccgcccgcctgcccgcaaaaaagtgaaagtcaccggggaaaccggatgtgcggcattactgctcggagcagaccaaatgagacggtcgggttatttatccgatcacgatatgaagattgcgaagaagctggcccatgtcattgccggcggaagagtcccgttcggcacggaggtttcagaagaatatttactcgagattgaaagagaagcctttttaagcctcgctggcgaggcgaaatctcaagcgagaatgcagcatatgctcgtcaaaggcaaacctttacggaactaggagggtgtttatgagagaagcagtcattgtggccggtgcgagaaccccggtcggtaaagcgaaaaagggatcgcttgcagccgttcgtcctgatgatttaggcgcgctttgtgtaaaagaaacgctgaaacgggcaggcggatatgaaggaaatatcgatgacttaattatcggatgtgcaacacctgaagccgaacaaggattaaatatggcgcggaatatcggtgcgctggcggggcttcctcatacggtgccggccattacggtgaaccgctactgctcttccgggctccaatccatcgcttacggtgctgaaaaaatcatgatcggcgcgggtgacaccgtcattgcgggcggtgcggaatccatgtcgcaagttccgatgatggggcatgtgacccgcccgaatatcgctttggcggagcatgcgcctgagtattacatgagcatggggcacacagcggagcaggtagccgaaacgtacggcgtatccagagaagaccaggatgcatttgccgtccgcagccatcagaatgccgcaaaagctcttaaagaagggaaattcaatgacgaaatcgtgccggttgaagtatcgctgacagaagtcggtgatgaccataagccgcggaaaaaacaatttaccttttctcaagatgaaggcgttcgtcccggcacatcggctgacgtcttggcgaagctccgtccggctttttctaaaacgggaaccgtgacggccgggaactcttcacaaacaagtgacggcgcggcggctgtcatgctgatggatcgcgaaaaagcttcgtcgctcggattggcgccgcttgtcaaattccgttcctttgccgtaggcggcgttccgcctgaggtaatggggatcggtccgattgaagccatcccgcgggcgctcaagcttgccggactcgaattgcaggatatcgggctttttgaattgaatgaggcctttgcttcacaggccattcaagtcatcagatcgcttgggatagatgaagaaaaggtgaacgtcaacggaggcgccatcgcgctcggacatccgctcggatgcacgggaacgaagctgaccctgtcactcattcatgaaatgaaacggagaaacgagcaattcggcgtggtgacgatgtgcatcggaggcggcatgggagctgccggcgtatttgaactcatttaaaaaaagggggaaacgaacatgaaacaggaaacggtcaacgtcaaaaaaggcggcagctttctgattgaagagacgggatatgatcaaatattcactccggaggactttacagacgaacacaaaatgatcggcaaaacgacagaagactatgtcgtaaacgatgtgcttccttatatcgatgaaattgaaaaccatcagttcgagcattcggtcagactgctgaaaaaagccggagatctcggcctcctcggagcagacgtgcctgaagagtacggcggaatcggcctggataaaatcagttcagccttcattacggaaaagttttcacgtgccggcagcttttcgctgtcttacggcgcccacgtcgggatcggctcattgccgatcgtgttcttcggaacggaagaacagaaaaaaacctatttgccggacttggcttcaggacaaagaatcgcggcatacgccttaactgagcccggttcaggttcagatgccctcggcgcgaaaaccacggctgttttgaatgaagcgggcacacactatattcttaacggagaaaagcaatggattacaaactccgcctttgcagatgtctttgtcgtctacgctaaagtggacggagataagttttctgcatttatcgtagaaaagaactatccgggcgtgtcaacgggaccggaagagaaaaaaatggggattaagggttcatcgacaagaacgctgattttagatcaggcggaagtcccaaaagaaaaccttctcggcgaaatcggaaaaggccatgtcatcgcttttaatatcctgaatatcgggcgctacaagcttgccgtcggcacaatcggcgcttcaaaacgggtgattgagctgtctgccgcttatgcaaaccagcgccggcaatttaaaacgccgatctcaagcttcacgctcactcaggaaaagcttgcgacgatgtcagctcggctttacgcgatggagagctctgtatacagaacagtgggcttattcgaagataatatgagcagactgacggaagcggagcaaaaagacggacgcgaagtcgcgaagtcaatcgccgagtacgcgattgaatgctcgctcaacaaaatgtgcggttctgaaacgcttgattatattgccgacgaaggcgttcaaattcacggcggttacggatttatgcaggaatatgaagtggagcgcgcctatcgcgactcaagaatcaacagaatttttgaaggcacaaatgaaatcaaccgcctgatcgtaacgagcacgttcctgaaaaaagccgtaaaaggtcagctgccgctctttgaaaaagcaaaagcgctccaagaagaactcatgatgctgatgcctgaagagccgggctcggagcctcttggacaggaaaaatacattgtcagacaggcgaaaaagatcgccctcttgacagcgggtctcgcggcgcagaaatacggaaaagagatcgaaggcgagcaggaaatcatggtgaacattgccgatatcgtcagcgcgctgtacgctttggaatcagccgtcctcagaacggaaaaagcgattgcggcggacggtgccgaaaaagccgcgcagaagctgttatatacggaaatctttgcccaggaagcccttcagaacattgaagcgcacgctaaagaatcactgatcgccatggaggaaggagattccctccgcatgatgctttccgtgctgcgcaaactgacgcgcctgacgccgaaaaacctcattcagaaaaaacgtgaagcggcagccgccgtcttccgtgaagaaaaatatacagtctgatcacatgctgaaagcgctccttcatcaggggcgctttttcatgaagcaacgttataggtttttacaagtgattgtgttaaaataacgacgatcatttacaaggggtgaagaagatgtcgttaaatttttactggtaccctaaatgcggaacgtgccgtaatgcgaaaaaatggctggaagaccgcggtaaggaaataaacgaaatacatatcgcggaggaaactccgtcgaaagaagaaattaaagacctctatgaaaagagcggtcttgagctgaaaaagtttttcaacacgagcggaatgaaataccgcgagctgaacttaaaggaaaaactgtaccatatgtcagaggatgaacagctcgaacttctggcatcagacggtatgctcctgaaacgcccgattacgacagacggcgaaaaagtcactgtcggctttaaagaagaccaattcgaaaaatattggatgtaatgccaggttcaaagaattatggtatcttcttattataagaaaaaaatggagggatttagatgagcacaccgaaagatatgcgttattccaaagagcacgaatgggtcaaagttgaggacggaaaagcccgcatcgggattacacatttcgcgcaagccgaacttggcgacatcgtctttgtcgagcttccggaagtcggcgccgaaattaaagcggacgagccattcggcagcgtggaatccgtcaaaaccgtttccgaactgtacgcaccgattaacggaacggtgacggaagtgaacgaagaccttgatgacagtcctgaattcgtaaacgagtctccgtatgaaaaagcgtggatgatcgtcgtggaaccggctgatgctgaagaaatcgaaaacctcatgacttccgagcaatatgacgaaatgacacaagaagactgatcggatagcaaaggggccatttggacattctatctgtaacgggaggtgtctaaaatggcttttgataaacaaaaggtcgatgtgacggagaacgttacgggccgctttcaaaacggccggttttccttgtttcatgaaaatgaagccatcggcgagatgacaggcatggaccagtacgagctcaaacagggcttttcatttgaaaatcaaaaattttataaaacagccgatgtcataaacggcagcgatccgaaatatgtcgattgcgattatgagaatggctggtgttaacagttggcggtgaatttcactgccttctttttcaatctgacgctaaaacaatcggcaggtgacgcgcttatgtacaacggagatgaaaaggtcattatcgtagaaggaaaatctgataaaatcaaagtcagggaagtgctcatcgaacccgcggaaatcgtctgtacaaacggaacgatcggccaaaccgaactggaagatttggcggaccgcctgtttgacagagacgtctatattttaacggacgcagatgactccggagaaaaattaagaaaacagctgaaacgggagcttcccgacgcgcgccatatttatatagacagaacatacaggcaagtcgagtcgtgcccgggccatcatctcgcatctgtgctgatcagagccggctttgatgctgacactgtatttttgaaaaagaacgacctgaggtggtaatcatgaaagaactccaagaaaatgaactcgaatcgattcaggatgacgtttatctcctgtatttgtacaccccgttttgcggcacatgccagctggcgtccaaaatgcttactgtcgtcgaagaaatgctgcccggcgccgccttctataaaaacaacgtgaattattcccccgcattcgccaaagcctatcagattgaaagcgttccgtgctttttgctgtttaaaggcggagagcttgttgagaaaggatacgccttccgctccgtttcctatttatatgagctgattaaacaaaaaacatcgcaaacgttcccgatgtgacaatatttacaggaaaatgtcgtgcggtttataaagggttctgtccgttaaaaagagaaagtgtatgtatggccattaaaacgggaggttatacgagtggagaaaatagaagtttcagagaatgacggacagcatctgtttttgaaaccgctattaaacgcctcaacgcttctgattacattccaaggagaaacagaagccttaacggtctcaattaacggacagggagaaatgagaaaaacgtcggtttcaaaggaaaaatctaatttgaccttttacggaaaccagacggaaatcattcatctcctgcatggtgatgtctctttgcaaaagcttatccaaagcggaaaactcaaagtgaaaggatcattcagagctctgctgaagctggaggccatcctctggctgacaaacggattttttcaggcgatcagtaaacggccgtaactcaatctactatgtgacaatagcttccaatatttattttattgactttttatcattcgccgtgctattctacagtaagaatttccggacgaaaatacgatatgttttctcttatcaagagaggtggagggaagtgccctatgaagcccggcaaccatcaacaatgttgaaatggtgccaattcactcgaagcggtctgctttgaaagatgagagaaaggcctttttcaataagcctttctgctcatttttgcagaaaggcttttcttttgcggagaaacccggaagatttcttagaatagtgtaaggcgggtgattgctttgatccatcttcaaaatgtttcaaaaatttacaaagcgaagcatggggatgtcaatgctgtccaagatgtcactcttgatatcaaaaagggcgaaatatttggaattataggatatagcggagctggtaaaagttccttaatccgtctcctgaacggccttgaaaagccgacgtcgggaaccgtggaagtcgcggggacggaattaaataaagtaagcagccgcgggctgagaaaagcgcgccaggaaatcagcatgatcttccagcattttaaccttctgtggtcgcgcaccgtccgggagaacattatgtttccgctggaaatcgccggcgtgaaaaaaagcgaacgggtccgccgcgctgatgaattgattaaactggtcggattagaggggaaagaaaaatcttatccgtcgcagctgagcggcggtcaaaagcagcgtgtcggcatcgcccgggcgctcgccaataatccgaaagtccttctgtgcgatgaagcgacatcagcgctcgatccgcagacgaccgattcaattttggatcttttatccgatataaatgacagactcggcctgacgatcgtgctcattacccatgaaatgcacgtcatccgaaaaatctgcaacagagtcgcagtcatggaaaacgggaaagtcgttgaagaaggcgaagtactccaagttttcagaaacccgcgcgaaccgatgaccaagcgtttcgttcagcaggtgacagaaccagaggagacgaaagaaaccatccagcattttctgcaggaaacagcgacaggaaaaacgattcagctttcatttgtcgggcaggcagccgagcagcccctcattacggaaatgatccgaaactttgatgtggacgtcaatattctgcaggggaaaatttcacagacgaaggacggagcctacggttctttattcattcatattgacggtcaggaaaaagaagtagaaaacgtgatccggttcatcaaagacaaacaggtagaagcagaggtgatcacaaatgtttgaaaaatggttcccgaacgttgatataaccgagctgtggacggccacatacgagaccctttatatgacggtcatcgctttagttttttcatttatcatcggagcggttctcggtcttctgctctttttaacgggcaagggaagcttatgggaaaataaaatcattaacaccgtgattgcggcggtcgttaatattttcaggtctattccgtttcttattttaattattctgcttctcggctttactaagattttggtcggatcgattttaggaccgaacgccgcattgccggcgctgattatcggctccgcgccgttttacgcccgtcttgcggaaattgcgctccgggaagtcgataaaggagtcatcgaagctgccagatcaatgggagcaaagacatcgacgattatcttcaaagtgctgattcctgaatcaatgcctgcgttaatttcaggcatcaccgttacggccatcgccctgatcggatctaccgccattgccggcgccatcggttcaggcggactaggaaaccttgcatatgtagaaggctaccagtccaataatacggatgtaacgtttgtagcgacagtatttatactcatcatcgtctttatcattcagattatcggtgatgtaattacaaatataatagacaaaagataagggaggatttacattgaaaaagattgtattaagtgcgctgctgcttgtgttcgcgggagttttggccgcctgcggatcaaacggctcgaataaaaaggaaatcgtcgtcgccgcgacaaaaacaccgcatgctgaaatcttaaaagaagcggaaccgctcttgaaggaaaaaggctacacattaaaagtaaaagtgctgaacgattacaaaatgtacaacaaagcgttagctgataatgaagtggatgcgaactacttccagcacgttccttaccttgaacaggaaatgaaggaaaataaagattacaaactcgtgaatgccggagccgttcaccttgagccattcggaatttacacgaaaaaatacaaatcactgaaagacctgcctaaaggcgcgaccatcatcatgactaacaatgtcgctgaacaaggccgtatgctggcgatgcttgaaaaagccggactgatcacacttgatccgaaggtgaaaacgattgaagcgactacgaaaaacattacgaaaaacccgaaaaacctgacattcaaaaaaatcgcccctgaattaacggcgaaagcatataatgaagaagaaggcgatgcagtcttcattaacgtcaactatgcgattcaaaacaaactgaatccgttaaaagacgcgattgaagtggaatcaacgaaaaacaacccgtacgcaaacatcatcgccgtacgcaaaggtgacgaaaaatcagagaaaatcaaagcgcttatggaagtgcttcactctaagaaaatcaaagacttcattgagaaaaaatacgacggagccgtgcttcccgtatctgaataaagcgaaaaccccggatgagtcatccggggtttttttcgggtattaatcggagaactgtccataataaaagggaaggttaacttattggagggaatggcagtggctcaataccaggataacggcaaaagcgtgcatgacgcgttaaaacaatacaaagaaggtttaggcatatttgaacaaaaaatgccgatgatggggcggaagtttaatgaatttactgaacagtgtttctcagcggattcattaactgaaaaagagaaacaattaatcgctctgggtatcagcatcagcgctcaagatgaattttgcatgatttatcatacgaagggctgccttgaccaaggggccacagaagaaaacatccttgaggtcatcagcgtcgcggcggcattcgggggcggcgcggctctcagtcagggagtgaccctcgtgcagcagtgcattcaggaattcggacatacgacgcattagaatgagcaatcgtgtgaataccgtttttcagataaagtgagcgccggtttccggcacattcgaaaggattcaggggcacactctctttggccggagcaggggatcattgttacaatagaaacaaatatatgaagggattgattcattatctgcaccagccacgagagactggaccttgactatacgcctgaaatggaaaaagcgatgcagaagtcacacggcatcggctacgaggaatacggacggcgtctttcaaaaaggatggaagtcgaacggcagagggagcttgaatatcaaaaaagcaagttcctcgcagcgcagcttaatgagaaaatcggtcagtaaaaaagggtggatttccgccctttttctgtttcaaacagctttaattacgccttgatctttgataaactttaggaatgttccgggtaatataaaaagttgtatttacttttcatttgttataaaattagaatgagaataaattgagaataatgattatatattttggaggtatagatatggctgcttcaacattaacgatcaaggatcttcacgttgaaatcgaaggaaaagagatcttaaaaggtgtaaaccttgaaataaaaggcggcgaattccacgctgtcatggggccgaacggtaccggtaaatccacgctttcagcagcgattatgggacacccgaaatacgaagttacaaaaggcagcatcacgcttgacggcaaggatgtactggaaatggaagtggacgagcgcgctcaggcgggtcttttcctggcgatgcagtacccaagcgaaatcagcggtgtgacaaatgccgatttccttcgctctgcgattaacgcacgccgtgaagaaggcgatgaaatttctcttatgaaattcatccgcaaaatggacgaaaacatggagttccttgaaatggaccctgaaatggcgcagcgttacctgaacgaaggtttctcaggcggggagaaaaaacgcaacgaaatccttcagcttatgatgatcgagccgaaaatcgccattcttgacgagatcgattcaggtcttgatatcgatgcgcttaaagtcgtttctaaaggaatcaacaaaatgcgcagcgaaaacttcggctgcttaatgatcactcactaccagcgccttctgaactacatcacgcctgatgtcgttcacgttatgatgcagggacgcgtagtgaaatccggcggcgcggagcttgcacagcgccttgaagcggaaggttatgactggattaaacaagaactaggcattgaagacgaaactgtaggccaagaagcgtaagcgttagggggataatcatgacattggaaacgaaactatccgtagatcaggaatatgtcaaaggcttttccgaaaagcatcaagaacctgcctggctgaaaaacctgcgcttacaggctcttgaaaaagctgacgatctgccgctgcctaagcctgataaaacaaaaatcacaaattggaactttacaaagttcaacaagcatacagtagaaaatgcgccgcttgcttctttagaagatttagctgatgaagcaaaagcgctgatcgatatcgaaaacgaagacaaaacgttatacgtgcagcgtgaccaaacgcccgctttcctttctctttccaaagaactgaaagacaaaggcgtcatctttacggacatcttaacggctgcccgtgagcacagcgacctcgttgagaagtatttcatgaaagacggcgttaaggtcgacgaacataaactgactgcgcttcatgcagcattaatgaacggcggggcattcctttatgttcctaaaaacgttcaggtggagacgcctgttcaggccgtttacgttcatgaaagcaatgacacggcattgttcaaccacgtgctgatcgtcgctgaagaccacagctccgtcacttacgttgagaactacatcagcacggtgaatccgaaagaagctgtattcaacattatcagtgaagtggtcacaggtgataatgccagcgtgacgtacggtgccgttgacaacctgtcagcaggcgtcacaacatacgttaaccgccgcggagccgcgcgcggacgcgacagcagaatcgagtgggcgctcggactgatgaacgacggcgacacgatttctgaaaacacgacaaacctctacggagacggcacatacggcgatacgaaaaccgtagttgtcggaagaggagaacagacggaaaactttacgacgcagatcatccacttcggtaaggcttctgaaggctatatcctgaagcacggagtcatgaaagatgccgcatcttccatctttaacggaatcggcaaaatcgagcacggcgcgtctaaagcaaacgctgaacaggaatcccgcgttctgatgctgagtgaaaaagcacgcggagatgcaaacccgattcttttaattgatgaagacgatgtaactgcaggacatgcggcatctgtcggccgtgtggacccgatccagctttactacttaatgagccgcggaattccgaaagaagaagcggagcgcttagtcatttacggattccttgctccggtggtaaaagagcttccgattgaaggagttaagaaacagctcgtctccgtcatcgaaaggaaagtaaaataatgaatatcaccgatattcgtgaacagttcccgatccttcatcagcaagtgaacggacatgacctcgtgtaccttgacagcgcggcgacttcccagaagccgcgtgctgtcattgaagcagtggatcagtattacagcaaatacaattccaatgtccacagaggcgttcatactcttggcacgagagcgacagacggctatgaaggtgcgcgtgaaaaagtccgtaagtttatcaatgcgaaatcaatggctgaggtcattttcacaaaaggcacgacaacttcactgaatatggtggcgctgagctatgcccgcgccagcttaaaacccggtgatgaagtggtcatcacccaaatggagcatcatgcgaatatcattccgtggcagcaggctgtaaaagcaaccggcgcgactttaaagtatatcccgatgcaggaagacggcacgctttcgttagacgacgtccggcagactgtcacaagccatacgaagatcgtggcagtcgctcatgtgtcaaacgtgctcggcacgatcaacccgattaaagagatcgccaaaatcgctcatgacaatggcgcggtcatcgtggtggacggggcgcaaagcacaccgcacatgaaaatcgacgttcaggacttggattgcgacttcttcgcgctttcttcccataaaatgtgcggcccgacgggaatcggcgtgctgtacggcaagaaagaactgcttgagaatatggagccggccgaatttggcggcgaaatgatcgactttgtagggctttatgaatcaacttggaaagagcttccgtggaaatttgaagcaggcacgccgattatcgcaggcgcgatcggattgggagctgcgattgattttcttgaagagatcggactcgacgagatttcccggcatgagcataagcttgcagcctatgcgcttgaccgtttcgagcagctagacggcgtgacggtatacggtccgaaagagcgggcgggacttgtgacatttaatcttgatgaggttcaccctcatgatgtcgcgactgtcctcgatgctgagggcattgcggtcagagccggccatcattgcgcccagccgctcatgaaatggctggatgtatctgctactgcgagagcgagtttttatctgtataatacagaggaagagatcgataagctcgcggaagccctccaaaagacaaaggagtactttacaaatgtcttttaatgcaaatttagatacattatacagacaagtgatcatggatcattacaaaaatccgcgcaacaaaggggttttggatgacagcatcgtcgtcgatatgaacaacccgacttgcggcgaccggatcagactgacaatgaagcttgacggcgataccgttcaggaagcgaagtttgaaggggaaggatgttctatctccatggcttcggcttccatgatgacgcaggcgattaaaggaaaagatattgataccgccctttccatgtctaaggttttctcagacatgatgcaagggaaagagtatgacgactcgatagatctcggggatattgaagctcttcaaggcgtttcgaaattcccggcccggattaaatgtgccaccctttcatggaaagcacttgaaaaaggagtcgctggcgaaaaaggcggcaattaaaagattggagtgaaaatggatggctaaaaaaatgcctgaaattggtgaatacaagtacggttttcacgataaggacgtttccattttccgttcagagcgcggattgacaaaagaaatcgtagaagaaatttcacgcatgaaagaagagcctcaatggatgcttgatttccgcctgaaatctcttgagcatttctacaacatgccgatgccgcagtggggcggggatttaaactctttaaactttgacgaaattacgtattacgtaaaaccgtctgagcgttcagagcgttcttgggatgaagtgcctgaggaaattaaacagacattcgacaaactcggtattcctgaagctgagcaaaaataccttgccggtgtttctgcacagtacgaatccgaagttgtttaccacaatatgaaagaagatcttgaagagcaaggcatcgtcttcaaagacacagacagcgcgctgaaagaaaatgaagacattttccgcgagcactgggcgaaagtcattccgccgactgataacaagtttgcggcgctgaactcagctgtttggtccggcggatctttcatctacgtgcctaaaggcgtgaaggttgaaacaccgcttcaagcttacttccgcatcaactctgaaaatatgggtcagttcgaacgtacgctgatcatcgttgacgaagaagcaagcgttcattacgtagagggctgtacggctcctgtgtacacaacaaactcgcttcacagcgcggttgttgaaatcatcgtcaaaaaaggcggctactgccgttatacaacaattcaaaactgggcgaacaacgtttacaacctagtaacgaaacgtacggtttgtgaagaaaacgcgacgatggaatgggttgacggaaatatcggttctaaattgacgatgaaatatccggctgtcattctgaaaggtgaaggcgcgcgcggcatgacgctttctatcgctcttgcgggtaaaggacagcatcaggacgcaggcgcgaaaatgattcaccttgcaccgaatacgtcatccacaatcgtatcaaaatcgatttccaaacagggcggaaaagtaacataccgcggtatcgtccacttcggacgaaaagcggacggcgcccgttcaaacatcgagtgtgatacgctcattatggataacaaatcaacttctgatacaatcccttacaatgaaatcctgaacgacaacatttcattggagcacgaagcgaaagtatcaaaagtttctgaagaacagcttttctacttgatgagccgcggtatttctgaagaagaagcaacagaaatgatcgttatgggcttcatcgagccgttcacaaaagaacttccgatggaatacgcagttgaaatgaaccgtttgatcaagttcgaaatggaaggctccatcggttaatagtaaaaccccgccatttggcggggttttttgtttattggatagtgaaattaccgtattcgcttgaccggacatgaatcggcccgtttaaattgtagttcttctctttgacaatatcgcggaaaacgtcgacacgggcaaccgattctctccattcatcctgagtatcctcatctgacggattcatcagatcgtcatagcgcacatccaagaatttattgagccatttcttctcgtcaattccatctttcggtgacccgcccatttttttgttcgtgcgtttaatcagggcataaaaggagtctggatcatcgccgtcgccatgctgaatcaccgtatcgtacatcactgcttttgccaaggccgttttcagtccggcattttctgaacgtttcatcgccggctgataatacaagctgtcatttaccttatcctgggcagcgcggaaggctttatcattgccaagtgagcgccaggcagaagcgaatcctttcagattgctgatgtcatcgctttcgtccttcgcaagacgccgcaattcaggcaaatactttttcaatttgttattcggcaccgctttcgtgtatacttcgactacttccagcgcatctccggtagccgtcgtaaagccggcccgcccgcaagtgtaacctcttccgtcatccaacgcttcaatatatccgtattggatttccgtctttccgttttcaaagatgctggtcagctgttccgcccggcgcttctgatccttattcagcccggccgcaaaaaccgtaccgctcatcatcagggtaaaaaacatggtgaaaataagtgacgaaaccgccgtcttcttccaaaaacctgcttttttcttcaagctgattttcattgccatacccctttcatatgtaagttacgcactcagtatacatgagggggttgtttttttgttgaaaacacacgaatttgtcaatattttgaatcctaagccctatcaggcgcttcataaaaaggacgcaccttcatcagacagacaatcccgttctcgcgtcattctcatctgtaacatagtcaacgcggagaaatccgcattgtacagcctgctgataaagggcttcgagcatatccggatctttgcaatataacgttacatacgagcaatctgcaatgagaagcacaagctcacaggaactctccaaatactcctcgtacgtattgatttccgttaccatcccgcccgggaaagctttcaattcagcaaaaatcatataataagggtttccttccagacgctgacggagttcttgaccctgaatgatgcgctgattttgcggaaacaggtctgtatcgatgccttctttgaattccgtatacgcctctccatcaccgataaaccacgtataggaagagatggggaacggttgtaatatatctgccgcaaaccgcccgaattgatttgggatgttaaatgtaatgccgcgtttcatatggtcgtatctcctttcggcttttgctagaataatatggtataccatttggataaatattgaaaggggtgggtgttatgacaacacgatacggaattgatgcgccttatggagcgtttggatttatctttattgcgctcctttatgccgcaggcacgttatacggcatgattcctccttactggggctggctgacgggcaccttgtttttattgctcggtctttggatgctcttgtattcaacggccattaaacttttacaccgccatcgcattcttgcgctatccggtttaaagccggacatgaaggtgcttgatgtcggtacggggcgggggctattagccatcgccgcggctcaaaaaggcgctgacgtctcagcgattgacaaatggtcaagctgggacctggtcggaaacggaagagacgcatttgaaaagaacagacaggctgaaagagcgccggaaattgatttgtatgacggactggcgcaagacatgccgtttcctgatgagacgtttgatcttgtcatttcgcattttgtcgtacacaacatttcaggcagaaaaaagagggaacgggcgattgcggaaatggtgagggtgctgaagcctggcggcattttggccgtgtcagatataaaaaatacatcacaatacagagagatttcttgaggaaaacggctttcagacaagaacgtattccttttattatacgtttccgttttcgaaactctgtcaggactccagtaggaaccgggcgctccatttgttaaaataaataagacaaaacagatagaaaaggtgttacacatgaagtcttatataattatcggagccggcattctcggtgcgtccgcggcttatcatctcgcaaaggccggtgcggatgtaacggtcattgatcggaaacacccggggcaggcgactgacgccgcggcggggatcgtctgcccgtggctgtcgcagcgccgcaatcaggcatggtatgcgatcgcaaaaggcggagcccgctattataaccaattgatacagcagcttgaagcggacggagaaacagaaaccggttatcaaaaggtcggagccgtcagcctccatacggatgaaaaaaagctcagccaaatggaggaaagagcttataaaagaagagaggacgcccctgaaatcggtgacattacaagactgactccggaagaaacgaaggcgctgttccccgcgctgtcggaggaatatggggcggttcatgtcagcggcgcggcccgggtgaacgggagggcgcttcgtaaggcgctgttaaacgcggccgttaagcacggcgcggcggtttacaatgaagaagcgtcaatattgacagaggacggtgccgtcatcggtgtgaaaaccgcagaacgcacgcttactgccgatcaggttctcgtaacggccggcgcttgggcgggagagctgcttgagccgctcggcatccgcttttcagtatcatttcaaaaggcgcagatcgttcatttagagcttcagggagaggatacgggcggctggcccgtcgtcatgcctccaaacgatcaatacattctcgcctttgacagcggcagaatcatagcgggcgcgactcatgaaaacgataccggcatggatttgcgggtgacggccggcggtctccgcgagatttttgacaaagcattaaccgtggcgccggggctttcagacagtactgtaatagagacaagagtcggtttcaggccgtttactcccggttttcttcccgtcatcggcaaagtgccgaatatcagcggactcctcgttgccaacgggctgggcgcctcaggactgacgagcgggccgtatctgggggctgaactggcgaaactcgcgctcgggcagcagacggaaattgatttgagcctttatgatccggccggggcgcttgaataaaaaatagcttttggcgcattcttatgataggatggagctttaatgaataagaggacgtgacccatttgataaaaataaaccttcctgctcctgatgtaaccattacggaacggcagcagtcaccgtcggagaatgaaccggcgattaaagcgatttacggtttcattgattttcaccaaattccgagagacaaaggcggcatctttatgttttataacattcatgatgagctgctgtttgtcgggaaagcccgtaaattaagacaaagaatcaaaaagcattttgaagacaatgtgtcgcctgttaaacatcacagggacgaagtgtataaaattgaagtatgtgtcgtaaatgatccgatggaaagggagatttacgaaacgtacgcgatcaatacccttcagtcgaaatacaacattgagaaagtattttataaataagaaaaaccggagcttaagggctccggttttctttatgtttacagtgccagccacatcacggcaatatgcacgatcagcagacagtaaacgacgaggaatagctggacgaccttttttctgaataacatgcagatcatcatgagcacgggaaaaatcaggacgccggccgttttattgattgatgtattcggacggttcgacacgtcatagtgaatggccatatcagcaggaagaaacggataaaacacaatcgacagaataaaggcgagaactacagctccccacagcactttatcattcatcaaaaacatatgaacactcccttttttacatataatagtatattagtccgaaaaatctaatttatcaatattttacctgttgattggtgtataatcatgtcaatgaaatttccatacgctaggagggtttcaattgactgacaagaagcaaaccagcatgttttcattctttctttttatcatggccgcctggatcatcgttttgttttttaccgtcatcgcggcactgccaagctccgccatccaattaaccaagcatcaatccaaaaccgtttccatgatttatccgcaaagctggggatttttcagtaaagatccgagagaagacagcttgaatatctatcttcttgatgccgatgaggagctcagatggccgaataattctctgaaaaatgtcatcggcttaaaccgctacggccggacgcaagggatagagctcggccttatgctggaaaagctgccttccaaagagaagtggaacgacttcacgactggccaagacattaaggataccacatttttgaaaatgaaaaatgagtctccctccccaaggctgaaagggaaaatgatcattacatatgaacgcattaccccatgggcatggagccagcataccgaaacgaaaagaaccatccaaaaatacatcggagtggatgtcaattgattcaggatgcaaaaaagcagctcaccttatggatgatgaagaatccgccttggacaaatgtgtacgggcttgccagaagcttaatcgcgctcggcacgctgctgacattgctgttcaatccggcgtctgtcttcttcaaaacgcaaaatcaaatgctcagcttttccgacacgttcagcctgtttctgctgtttcccgatttccgttacattgagatcgtcaaagccgtttgtatctgtatgttaatccttgtcgtcattggctggcggccccgcctcaccggtttttttcactggtggatttcgtacagcttccaaaactccgccgttactcttgacgggggagatcaagtggctgccgtttttacgttgctgctgctcccgctgacattaaccgatccgcggaaatggcactggtctccgtacgaggcgtcttttgagaaaaggccgcttgagccttattaccgctccttgtgctgggcgacgctgacaatcatcagaatacaggtcgcaatgctgtattttaactccgtcattgccaaactgatggaagaagagtggcagaacggaactgccgtttattactatttgaacgatccgatgctgggtctgccggatgcgcttcacggtctgtttgactttatcctgcagtccaagcttgtcatcatcccgacttggggcacgcttattgtgcaaaccattatgttctgcgctttgttcgctccgaaaacatattggcgtctgatattgtttatctccatttttatgcacgaaatctttgccgttatgctggggcttacctcgttttccattacggtggctggtattttggtcctgtttttggtgccggcagagaaaacagtagctttgaaccattacaatcccctttttatcagatacaattttttcaataaaaggaaaaggaggaaattatttggttaaaagcaagaagtccgcagctgccatgatgctggtgtttgttttaatggtcgcattagtcggcccgcatgccgcggcgaaaactgagccgtcggtctcttattcgggtgaagacattttttccggcatctttttcggacaaggtgaggtcgcaaagctccttcctgaagtatgggataccaaggctgtcaaaaagattgatcaggatgaattaaagcaagtttccgatcaggtgatcgctgatattaaaaagtcatcgccggattattttaaagagttgaaagcggcggtctacagcggcgattatgagaaagtgaacagcgtcattgatcaaggttcgcagattatggcgaaagtgctgaaagaagagtttgacaaaaagagcatggacaaaggaaaatcaacggccatcggccaatgcgcaacggctgtatgggtatttttaaacgcggcggccgccattgagacgatcgctcttgcggtagcggccatcattttgacagtagcaagcgttgacgaagattccgacttaggaaaagagcagctcatcgctaatgtcgttgaccgcattaacgcgcagcactgaggctgaagaaagaaaacgctaaggaaacgaaccttagcgtttttttgattgaagcatctgttttaaatatgcttctgaatcaaagccgagttcctcgtcggcttcttttttcagttcaagctgaagtcgcacgtacgtgtcatatttcgggctgagcttttgaagaagattgctgaaaggcgatcccgccttcagcgcgggcagatcagaagcggattctccgaccttgatcaggctttccctgtattcttcatctgtctgcactcttttcacaagctgaatgatgatgtttttatgagtgtcccaagtggcggggtctctctccaaaatccgctcgataaattggtcatgctgtactttgtgctgctggagctgagccggatcctccttgccgaccagctgcatcatcgggtgtgcagccggaacttcttccatatcatccaatactttaataagctccgcccatatcgtttttttctcatctgtatcaatagaaaagtcgaggaacggttcaaacagcgcggcgataaattctccgaaatctcccgggaacagttttttcagctgaagtcccatatacttcggttcatctattttgacctcgccgatatcatgcagaattgaatcgacattttccgcatcttccacgcgcttgatcagcatttcagtcagtttccgttcctgctcaagctcttcaatctgccggctgagcttttgatgctgccggcgcagtatatcatgcagactgctgccctctaagaggaacgctttaatatcgcttacagacagtgccagcattcggagggcggcaatcattttcagcgtattcacgttctgagcggaatactcacggtatccgttatcagggtttttgctgacggtgattaaaccttcctgctcataatatttgatggcttttttcgtgagacccgtctgcctggcggcttcttttatattcattctgaatcactccctgtttttcattctaaacgtgtctctaagggtcaggtcaagagagggcgggaaataagacgggtttattttatattttagaaatttcagaaaatatgattgacaacgcacctttgttgcgattaatataacgttatataatgttatataacgttatataataaaacactgaggagtgaaggatttgagtcaaactgccgcacaagtgaatcacaaagttcaggctttcttggatgatctgaaaggaaaaacgattgaccacgtctttttcgtcgcttgcgggggttcttcagccattatgtatccgagcaagtacgtgtttgacagagaggcgaaagccatcagctctgatctctacagttcaaatgaatttattcagcgcaatcccgttcagctcggagagaactctctcgtgattttatgttctcagtcaggcaatacgccggaaacggtgaaagccgccggtttcgccagaaaaaaaggcgcgcttacgattgcgatgacctttgagcctgattcgccgctagcgaaagaagccgaatatgtcgcggtgtatgactggggtgagaatgcacaggcgataaatacgaattacggggttctgtatcaaatcgtgttcggcgctttacacgtgctggaaaaccatcccgcgtttgagtcggcgatcgacggactcaataagctccagaccgtatatgacaaagcgcttaaacaagaagcggatcacgcaaaggcattcgcgaaagcccacgaaaaagaagatatcatttacacgatggcaagcggtgcgaactacggcgtcgcttactcctacagcatctgcattctcatggaaatgcaatggattcattcccacgccattcatgccggagaatattttcacggaccgttcgaaatcattgatgaatccgttccatttattatcctgctcggcttagacgaaacaagaccccttgaagagcgggcgctttccttctcaaaaagatacggcaaaaaactgactgtgcttgatgcggcagcatatgatttttccggaattgacgattctgtaaaaggctatctggctcctctcgtattaaaccgggtgctcagaagctatgcggatgcgctggcggaagcaaggaaccatccgttaagccagcggcgttacatgtggaaagtcgaatattaagaacgcgcattatatttcaccggactataatgatatataacgttatagtccggtgacaaaggaggaaaagcatctgaaaaagctcatctgcctgttcgttctgttagccgtatgtctgtcagccgccgcctgttcaagccaaagcagttcctctgacggaaaagtgactctgaagttttttcacaggtggccgaaggagccggaaaaaagctattttgaagaagcggtcaaagaatttgaagccgctcatccggatattcatatccaaacggaagcggtcttaaacgattcttataaagacaaggtgaaagtcatgctcggaacaacgagcccccctgatattttcttttcatggagcgaccggtttgcttataaattcatcaaaggagataaagccctcgatctgtcgtcttactatcagcaggataaagattggtcctcacagcttgtgcagtcacaaatcaaaccttttacgcatgacggaaaacagtacggtgttccgtggcaaatggacgctaaatcattcttttataataaggacatttttaattcattacatttgaagcccccggcgacatgggatgaactgatcacagtctctgagaaattgaaagagaacggatatattccgatcagtttcggcacaaaagcgccttggaccatttctcattatatcgggacgctgaaccagcgtatggtggatgaaaaaacgcgggcgaaggattacagcccggaaaccggggagtttacggacgaaggctatgtcaaagcgcttgaaaagcttcaggaacttctgccgtactttacaaagcacgtgaactccgttgatcacgaatacgtgcgccagcagtttacgagcggcaaagcggcgatgatttatgcggaaacggcagaaattaagctcgtcgaaccggtcaatctgggcttgtttcctttcccgaaaatcagcggcgaaaagggatctccccgtgcactgaccggatctccggaaggatttatgatttcctcaaaaacgaagcacccgaaagaagccatggaatttcttcagtttttaacctcgaaaaaaatgggagagaagctgataaaagacgtcggtaaatacagcgcggttcagggaacggcgacagaaaacaattccaccccgatccagcgtgaagccgtgcaggatatcgtccgcgccgaaacaatggtgccgtggtttgatatggatgttgacgttgaaatcgccgatgtgtatgcggcaggcgttcagcagatgctcggcggcacaatgacaccgcgcgaggtgatgaattccgtgcagaaagcggcgcgtcaagtcaaagcgtcatctgaatagaacagatttctttggagaaaggagatgaggatttccttggtcagccgaaaacgtttcattccgtatctgtttctcgcgcccgcgctgatttttctgctgttcgtttacattccgattattgagaatgtgtttttcagtctgtttgaatggagctcatttcaacccgaaaagacgtttatcggtttgaaaaattatattgacctgtttcacgatcccgtattttttacagcgctccgcaacaatgtgctgtatgcggtcatatcgctgatttgccaggttggcggcggcttaattctggcggccgtgctggaagacagattggtaagaaaatggtcgccgtttttccgcacggtcttttttcttccggtcgtcatttccatgaccgtcattgcgctgttgtttgattttatttataacccggaaatcgggcttttgaatcagctgctggaagccgtcggacttgatgaactgacccgggcgtggctgggcgatgaaaacaccgctatgctgtctgtcatttttgtgtctcaatggcagtctgtcggttacatcgccatgctgtacattgtctcgattcagagcattcctgctgaattatatgaatcggcgcagctggacggagccggaaaaatccagcagttttttcacattacggtgccgcagacgaaagaaatgtcgtttgttgctgtggtgatgacgctgaccggcgcatttaccgtatttaatgaaccgtatattctgaccggcggaggtccgggcaatgcttcagaagtgctgagcacatttttgtataagagcgcttttacaaaggatatgatgggctacgcttctgcgatcgcgacggtggtgcttttgctgacgcttgctctgtcgcttattcagatgaaattctttaagaccggaaaggaggagtagccgatgcttcctgaaaagacggacttgcgtcatgcccgtcaggccgtcagaacaggcggaaaaccgagaaaatggtatgtcggggaaacgtctgtgtggctgtttctctttatctacctcattgccgttgcttatccgctgttatggatggcggtcagcgcctttaaaagctcggatgagatttttgagcacagctggtcgctgccctctgtctggcatcccgaaaacttcgtatccgcatggaaccaagggatttccgcttattttatgaacagtgtcattgtgaccgtgctgacttgtctcatcaccgtatttgtgagcgcctgggcggcatacgggctggcccgttttcaatttaaaggaaaagggtttgtgctgatcatttgtcttggcggcttgatgctgacgccgcaggtcagtcttgtgccgctgtactccattatccagtcattgggactgtacaatacgtattgggcattgattcttccgtacgccgcctaccgtattccgtttaccgtgattctgatccgttcctattttttgtcgatctccaaagagcttgaggaagctgcctatctggatggatgtacaagtttcggaatatttttcagaatattcttacctatgagcgtgccgattctggtgacatcaggcattttgacggcttaccatacatggaatgagtttatgtttgcgattatttttatcgatgatgaaaatttacggacgattccggccgggctgatgcagttcagagatgcgctgcagacggattggggcgtgctgctggccgggctgacgatttctgctgctccgatcatcgcgctgtttctattgatgcagagatattttatccgcggcattgctgcgggaagcgtgaaaggataaggaggatgaaaagatgaaactgatagcggccggagataatgtagtagattattatcaggatcaggagacgttttacccgggcggaaatgcgttaaacgtagccgtgcttgcccggcgcttaggccacgaaacttcttatatcgggattctcggcagtgatgaagcggcggatcacgtattgaatgtgctgaaactggaaaaggtgaatgccgatctgatccgccgggcatacggagaaaacgggatggcggtcgtcacgcttgatgaaagaggggacaggatatttgccggatcaaataaaggcggcgtgcaatcgcgtctgacgctcgcttttcaggagaatgacatctcatttatcgccggacatgatctgctgcatacgagcgtatacagcaggatagaacgtgacctcccgatgctgagcggccatgtgccgatttcctttgacttctctgtaaaacgtgacgaagcctatttagaagcggtctgtccgtacgtgacgtatgcgtttttttccgggagtgatttgagtgaaagtgaatgtatgcggcttgccgaaaaagcccgcggtttcggagcgaaaatcgtctgtctgacaaggggggaatatggcgcggtgttatcggatggggaacgcgtctatcatcagccggtggtaagagctgatataatagatacattgggcgcgggtgattcttttatcgccgggtttcttaccgatttcttcgagcatcaggatattcggcgagcgcttactgcggccgccgggacggctgccaaaacatgcggagggttcggagcgttcggttacgggcatccctacaggccgggcggcgggaaaagcagtgaaaaaacgagaatacgataagcattgtctcgttttttatacttgttacgcatagggactgttaatggtaaacgtaacgcggtcggtatgcattaaaaacagcgagctgtatatcggcttgtcttttgacataaatgcggttttgtcaatttcaaaaagcgcatccccgatatcacaagccagatagcggctttcttcctgcttggcgtatacgacatttaacagcttcgtattatgggtgggcaccacctgatagtgctgtttcaaaatgtcatgcatcgacacgccgcctttaatatgcttgccgatgtcgggaaataaactgagcggatagtgggcgatttcgaatgagagcggctggtcgtcgtgaaataaaatgcgttttaattcaagaacgggactttcggaagcgacgcgaagtttttgggcgatggatttaggcgcttcaatggtttcatgggaaaggatctggtgtttcggttttttccccgttgattccataaattctgagtagccgttgaccgcgatgagctcccgcttcagtttagggcttttaacgaacgttccctttccctgctgccggacgagccagccttcttccacaagatcaaggatggccttcctgaccgttatgcggctgacgttgtacgtttcgcacagctcattttcggtcggcagttttacggacggcgaataaacgcccttcttgatatcgtccgcgataatttgtttcagctgaatatataaaggtttcgagctcccgttatttaacaatgggacggacctcctttgtcaagtagtagtactattatatgtattatgacgttataatacaaatttgcttttcatttatgaatctgtcagaaaccccgaacatttttaacataacagaaagatgtggcggtttccagtattggaggaggtttcgaatggcatcattaacatttgaccatatcaaaaaaacatacggcgcccaatcggcggcagtgaaggattttcacttagatgtaaaagatgaggagctgctggtgctagtcggtccctccggctgcggcaaatctacgacactcagaatgattgccggactggagagcatttctgaagggaagctttatatcgatggagacgcggtgaacgatctgcccccgaaggatcgcgatatcgcgatggtttttcagaattacgcgctgtatccccacatgacggtgtttgataatatggcgttcggtttgaagctcagaaagctgccgaaaaaagaaatcgcagagcgagtccggacggccgctgatattttggaaatcgggcatctgctcaagcggaaaccgaaggctctttcaggcggacagcggcagcgggttgcgctcggccggtcgatcgtgcgggagccgaaagtgtttctgatggacgagccgctttccaacttagatgcgaaattgcgagtgacgatgcgcgccgaaatcagcaagctccatcagcgtttgaaagcgaccatcgtttatgtgacgcatgatcagacggaagcgatgacaatgggcgaccggattgtcgtgatgaatgaaggagatattcagcaggccgcaagcccccatgagatttatcattatccggcgaatctgtttgtggcgggttttatgggttctccgagtatgaattttataaaaggcgcccttgaagaaagtcacgggcaatggtattttgccggttcgtccgttcgtctgcccattccgaaagaaaaagcggccgttcttgtgcagaaaggatacagcggtaaggagatgattgcggggctgcgtccggagcatttgacgcttgccggacaatcagagcacccgcctgaagcggtgtgccgcgctgtggcggaagtatgtgaaaacttaggcgcggagatgtacgttcatgcggtgaacggagatgaccgcatgacgatccgtcttgacggcgcttcacaggtgaaacccggcgatgccattctgcttgcggtcaatatgaaccgggccgtcttttttgatgccgacactgaaaacgccgtatattgaaaaagggagcctgatgatcggggctcccttatcacttcttatgatacgattaccagatttcgtccgcccattccggatggtcgataaacggattgcggttatgctgatagtcttcgtaaatgatttcgttccgccgtttttccttactgtcgacggggtcttgttgattccatttgagcaaaacggacagttttcccatgtaaggagctgagccgtttccggttttatcattcagctcaaggtcgggatacccgtcttctccttcataacgcaccgccatgtaaaacagcatgcgggcgacgtctcctttaacctcatcgcgcggctcccaggaatcgccgtcgtaataattgcccggcgctttcgggtattctgagccgccgttatcaaaatccatatttcctctggcactgttcacctgaacgtctgcagggcgcagatgatgaatgtccgtcccggggccggcagctgttccgaagtttccgtgtgactttgcccacacgtgttcgcggttccagtccccggcgctgccgccgtttttacttttggcccgtgattcctgggtgtagagcaagatgacattgttcgggtttgccggatcttcgtcagtttccttcaatgcattccatacttggctgtaagacagctttgtatgtccgctgatgatgcggtgcagggcgctctttaaggccgttccgctttttccggaagcttctttgtaatatgtgtccgtatccgcagacggagtgatgacagctgaggcagtttgcggaaaaagagttgtgtcgccggcagttgaaaccgccatccggctgtacagattcgtgtcagccggcgcgcccgcagaggctgacggcgcggcccatccaaaaatgaaaaacaggcagacaatcggcagaaaccaaagtttttttgtcatgacttgccctcctttacctctattatctgaaaaataaatctactattctatcttttttgaaaaatggttccttcggcttattggtcaaagtatccggaaaatcattgattttttggaagataagataatgaactcgttatgcgctccttctataatgaagatcatcttgtcagtttttcagtttaaaaggagggcgtgtatggaacatcagcagctttcggcggcgaatatcgggatttccgatgacatacaatggctgtctcaattcggcgcttccgcttccggcggagtgacgaggcttttatatacgaaagaatggatggacgcccagcttgccgtcaaaaagaaaatggaggcgttcgggctggaaacggcatttgacgatgtcggaaacgtgttcggccggctgaacggcacagaatcgcctgatgaggtgattctgaccgggtcgcatattgacaccgttattgacggcggcaaatatgacggtgcgttcggcgtgctggcgggcatgctggcgatccgtcatttgcatgagacgtgcgggcgtccgaaaaaaacgctggaggctgtgtcgctctgtgaagaggaagggagccgttttcccatcacctattggggctccggcaatatcaccggtgctttcacgctttcaaatgcggaaacgccgaaagacgcgtctggcatttctctgaaagaagccatgcggcagaacggcttcggtgcaggccgttatccagcaccgctgcgcaccgatattagtgcctttctggaaattcatattgaacaggggcaaacgcttgaacgatcgggaaaggatatcgggattgtcaccgggattgccggacagagacgctataccgttacgcttgacggtgaatgcaaccatgccggcaccacttcaatgaaatggcggaaagacccgctcgcggcgggaagcagcatcatccacgaactgatgctttcagcggaaagacagccggaagagctccgtctgacgtgcgggaaaatgacggttgaaccgaatatggcgaatgtcattccgggccgtatccagttttccgttgatattcgccaccggcaggaagacgtgctggcagccttccatcagaaactggcgtcgattgttgaaaacatcagccgcagcaaaggagtcaggcccattattgatgaatatatgaggatagagccggttcaaatgaatcagacactgacgcgtaccgcagcggaggctgcaaaagaactgggggcggacccggagaaaatcgtaagcggagcgggacatgacgcccagatgctcggcagaacctttccggcctgcatgctgtttgtaccgagccgtggcgggatcagccactcgccgcttgaattcacacccgtacatcagcttgaaaccggcgtccttacgctggcgaatgtattacataaacttgcctattaacgtaaagggggaatcggcgtgccgaccagaaaagaattgtgcattccgcaaagaacgattatgacaccgggaccgacagaagctgaaccgagagtgctgagggcgatgggcgctccgatcatcggccagtttgacccggcatttaccggcatcatgaacgaaacgatgcaaatgctccgtgaattgtttcaaacggaaaaccgctgggcctatccgattgacggtacatcaagagcggggattgaggctgttctcgcaagtgtgatagagccgggcgacagcgtgctcgttccgatatacggacgcttcggatacctgctgactgaaatcgccgagcggtacggagcggacgttcatacgatcgagtgtgaatggggaacggtcttccggcctgaagagattatcagcgagatgaaaaagatttccccgaaaatcgtcgctatggtgcacggagaaacatcaacggggcggattcacccgctgaaagaaatcggggaagcgtgccgcgcccaagacgcactctttatcgtggatgccgtggccacgattggcggatgcgccgtaaaaacggatgaatggaagattgacgcagtcatcgggggaacgcaaaaatgcctatcggtcccttccggaatggcgccgattacttataatgaccggacggcagctgtcattgccgcgcgtaaaaaggtagaacggggcattgcgacggcagctgacggcaaaaggctgtccggtcatcggccggttatgagcaactattttgatctgagccagctcgaagattattggagtgaaagaaggctgaatcaccatacagaagcgacagcaatgctttatgcgctgcgggagggtgtgcgccttgtcctggaagaaggacttgaagaacggttccgcaggcatcggcgtcatgaaaaagcgcttacggcgggacttgcagcgatgggccttgatttattcggcgatccggaggcgaagctgcctgtcgtcacatgcgtgaagattccgccggaagcagacggcgaatcgatcagaaggatgcttttgtctcaattcggaattgaaatcgccagctcgttcggtccgctgcaggggaaaatttggcgaatcggaacgatgggctacagctgcagaaaggaaaatgtgctgtttgtgctggctggacttgaagcggttctgatcagacacggagtttcagttaaagccggggaagcgctgcaggcgacccttaacatatatgatctgccggctgaaaccgttgtgcggtcatgagacatgaaaacgagattgaaatcatctggacttttttcccttttccccgttatactgaatggtataaaaaatgacaaatatggaatgatcatctgtttgtctggggagaaggtaagaaatcatggcgtacatgggccgattgtcaattttaatgctgaatatgtttattgcgatgcttggaatcggattgattattccgattatgcccgcatatattaccgaattcggagcgacggggagcacgatgggtctgcttgttgcatcggcggggcttacacagcttttatttgcgcctattgccggggaaataaccgacaaatacggacggcggaaactgattattttcggcattgccgcctttgccgtgtcacaattgatcttcgcttttgcaggaagcctgtggcaattgttcgcatcccgccttttgggcggaatgggcgcggcgtttttaatgccgtcaatgttcgcttacattgcggatattacgaccgaggaagaacgcgggaaaggaatggggctgttcagcgcggcgatgacgctcggtgtcgtcatcggacccggtgtcggaggctatttggttcattacggcatgtctgtgccgttcatcgtgtccgcaagtctcgcctgcttttcaacggtgctttcatttttctttctgcccgaaacgctgggacgtgaaaagcagctggaagcccgggcaaaaacggaaaaacgtgagcatctgtttaagcaaatgtcacgcgcgctcaaatcgccgttcgcgtttatgctgattctggtttttgtgctgaacttcggaattatgaactttgaatccgttttcggcctttacgttgaccataaacacggatttaaagcgtctgatattgcctttattattacggctgcgggtctcatcggcgtgtttgtgcaggcggtcggcgtcagttatctcgtccgcaggttcggggaaaaacgcgtcattaacgtgacgttgatcggggctgctgcaggacttgtgtggtgccggtttgcgggttcatattgggccgtttttgccgcggcaatctttttcctgacgctgacatcgctgctccggccggcggttaatacgatgctgtcgaagctcgccggtgaccagcaggggtttgccggagggatgaacacctcattcatcagcttagcgaatatcgccggaccgtcagccgccggttttctctttgatgtaaatatggaatttccgtatatgctgggagcggccattctcgccatcagttttctggccgcgcttggctggggcaaaaagacacagacccggccgttcacgcagcaaggatagaatcaaaagcctccgggtatccggaggctttttgctgattgccgtttattctttggctctgcatctctgaaattgcagagatgcgcatagaaggaaaatcatatcgaacgccattgtgaattatagggaaatcagttgttccatatgctcaagcgcgaatggaaaccggaacaggtgtagataaaggaaaaccagctttatcgcttgacgagtctgacgaatttgatgccggaagttgatcaaaaaagaaggcagtcaggcggggacatcattgagcggaaaatgctgagaaggaaaaagcagtggtttggaacttgctgtttcgtatgcagagggagagcattctgataaaacgggtcattgaaataatacgaactgttcagatggggtctattggtgtattacggagtggcggtcttataaaacctctctcgggtgattttgtgatggttcccctgcacgaattttgcaggctaaaacccgcaattaggccaacacacaattatgcaagagacaatcatctaaaaagggtgtcggtaagtacaatatggtgtacggaaaaggagttgaaaatgttgtattattacccgtcattccatttgtatcagcggcaagaatttaattcttatccatgggcccatcaattgacccattcagggagctccacctatgtttccgcgcgccctcctttttataattctccatgttacagagagtgcataagaagcggagcggatagttatttctgctgctatatctgcggtttttgttaaaaagaaagacttatagaagtaagtgatctttccaagatgacagtgagaccattatccagacagccattagccaacatacgaagcttcattacgattcacggaggggaagcgcccctccttttttggaaattttataaaatccccttgcacggcccgtcagaagtggtatttggtcttgatgtgttcgactgttggtattgacaaagaattcaagataccaggaagcagcgaaacttgtatgtatcagcgagacacaaagttttccgccgctgagcgggttagttctcactgcgttctatctcctgtagtagataacgagattttggggctgtctgctgaagaaaaagaagagattcgcagtgaagtcttagcaaacatggaataaaatagtataatatcctcattacttttacgaaatgagggaagttatggattggttggagttttggtcatcagtaataaaatctattgcctggcctattattgttttgatagcagtgttttttttgagaaagcccgttactcaattaattgaaaaaatagctgaatggaagctagctacacttaaatatggagattttgaagcaacatttagtcaaggtcttcaaaaagtcgagtcagagttagatgagtctgatactagcggcagttctgagcctgacgattctcaaacaaataaagagccttctttaattcagatactaatatcaatatgatagctagagaagctccttacttagcagttgtcctatcttgggttttggttgagcatgaactagacgctgctatggcaagagtaggttttgatagtgatacacttaaggggaaatttgtaactgcaaaattaaaaatgaggtaccttattgaaaataaatatttagacaagagttattatgatgcttttagtgacctgttacgtttaaaaaacgtagcttcacacgaatataaagaagctaaaaacattagttactatgattctatgaaatataacaaattaacaaaaaaaataatcaaagggctcaaagatatagctcctttttaaagatcttctatcatgaaggtctttttattttgaaatgagtgaacacatgccaagagaactgataaatgcaaaaatcacacatgtttcttacgtagacaaggctgctaatcaaaagcagttttttttatgaaatcagaaaaagaaaagcagcatgactttcagggcggcgttggtgaagtggttgagtcttatgtcgctccccgctgatttttaaatgaatggcgaaaccatcaaaaaaggatcatgggtgcttgtgacaaaggtaccgaggcaatttgggaggaaattaaaaagagtgagattatcggttgtatcctgaatatcgaaaaagcctgatgatatcaacggaagcagatgttgatggcagcattttttgagaatttagctgaatgaattccccttaaataggatgcgggagaacaccccgcatccctgtctctaacgatttcttaaccgatcagccgctgcattctcagcgcgagccgcaggcgcatcgtcgtctccggatcttttaagcttttgccgagcagttcctcgcatttttctaaacgatagatcaccgtatttcgatggacgtacaggcgcttagccgtttctgaaatctggcagtgggtctccagataaacagacagcgtatgaagcaggctctggtcctccttttgccggtcggccaggctttggagggtggcttcgtaaaatttcttcacatcttccgccggaagcaggcggagaagctccggcacgtctttggcatgatagatttgaataaactccgcgcttctggacaaatgcccggatgaaatggcgtctgaagcttcagtaaaagcgtcagggacgtcgatcagcttttggcatatgtttgagatgccgaaggagacagtccgtttaaattgcgtccggacctgcttttgaaactgctccaaaaagctgatgacagacgcgtgcatttcattccagctgtctgtcgcttcaattaaaagaataccgacatttcctttaataaagagatgagggggaaacgggaaggatgacagctccccttcaagcagatcaaatacatgatcggaaacgagctgattttcggtaaagctgatcgttttctcatttcggtcaagctttccgcaaatgcacatgtatttctgatcccagcggagccggaattctttggcgcggcttttgatttcttcatggccggtaaacgagcggtcgatgaaattgctgaaaaattcattgcgcgcccgtctgctgaattgtttgacggcattttctttcagcagttcaaaggaaatgacgttagccgcctgttcaatagtcaaaatcatgcctttatcagcggtctgcaccagctccggtatcaccagataaccgcagtttttttcaacattcagaatcggcaggacagaatacgcctttctgtcggacagcatggaaaagcaggtgaaataaggcccggaaagggaataacagatgtttttcaataaagacgtgtcaatgggtatgcggtgggacgatgataagagttttgtatgctgatccaaaagcagcacgggaagccggagaatgtctgagagcttcttaagcagggattgcagccccttgccgctcatgatgtggtttgtgaattttttatgggcgtaaatggcctgctggagctcatttgaacgcatatcaagaatatggctcagtgtggcgttgacgatatctcccagcctgatgtcttccggcagctcaataatcggaaattcataccggtcggcaagctccgcggcatctttcggaatgacattaagataacgcttcgttttgatccccagtcccgcgcagccccgttttgccatgaggcggatcaaatctttcaacagttgcgggcggtccttcaagtggtaagccgtggtgacgagcaattcgtttttatgtaaaaaatcagcgatgtccggcgcatccatcatgttgacgtgctgcacctccctccagccgccggatttgcctgcgattaatgcagcccgctcataagcgggaatcttcatcacgtcataaatgttcatcagtcagtctcctttcaggttctaaagacaaccattggttaatatgaataaaaatcatcaaaaattatagcggttttgctgatgtattacgatcatagtagcagtaaactggcaatcatagacgcatgttgtgataaaaactgacagaaaatcgtcatccttacagggaggaagataaaatggcctatgacgtaattgtaaagggtgcgaaagctgtacgaaaaggcggaacagagcgggctgatatcgccgtcaaggacgggaaaatcgccttgatcggacccggcattgacgaaaacgcggaacaagtggtgcaggcggacggcatgtatgtgtttccgggcgcggtcgattgtcacgtccatttcaatgaacccggccgagaagaatgggaaggcattgaaaccggctcaaacatgctggctgccggcggctgtacggcttattttgatatgccgcttaactgcatcccttcgacggtaactgctgaaaacctgctggcaaaggcggaaatcgccgaacggaagtcagcggttgattttgcgctttggggcggtttgatgcccggatataccgaacatatccggccgatggcagaagcgggggcaatcgggtttaaagcgtttctgtctaaatcgggaacggatgaatttcaatcagccgatgaacggactcttttaaagggaatgaaggaaatcgcggcgtgcggcaagattttggccctgcacgcagaaagcgacgccctcacccgattccttgaagccgagtacgcgctccaagggaaaattgatgcccgcgcttacgcttcctcccgtccggaagaggccgaatgcgaggctgtgcagcgggcgattgaatatgcaagagcgacgggatgcgcgcttcattttgtacatatcagcacgaaacgggccgtgctctccattcagcaggcgaaaaaagacggattggatgtcaccgttgaaacgtgtccgcactacttattattcagctttgaagacttcctcaaaaaaggggcggccgccaaatgcgctccgccgctccgctcagaggctgataaagaggaaatgatcgggggtttggctgagggcctgattgatatggtgtcttcggatcattctccctgtcatccgtctttgaaacgcgaggataatatgtttctgtcgtggggcgggatcagcggaggccaatttacgcttctcggcatgattcaattagcgatcgatcatgggattccgtttgaacatgtggcccgatggacggccgaagcaccggccaagcgcttcgggttaacgaataaaggtcggcttgaagaaggatttgacgctgattttgccatcgtccggccggaaccttttaccgtcacaaaagaaacgatgttttccaaacataagcaaagcctgtatgaaggccacacctttccataccgaattgctgcaacctacagtaagggacgctgtgtgtatcaggatggcggtcgtaagcagagcggggctttcggaacattcctgaagccttctcaaataaaagagccgattctctgatgagaatcggctttttttgtcgtttggaaagcgggtctcgtggtatctttttataaaaaggagtaaaacacattgtatgatcaaatcttgaacatattaacggcatcctggtcgcgcaagactagtacaaaatggacggaagattgcccggccaaaggccagtgcggcgtaacggctttagtcatccaagatgtttacggcggtgacattctcaaaacaaaaaccggcacaagctggcatttttataaccgaatagacggggagatatatgatttcacgagcggtcagttttcagagccgatcgtctatcagcacattctttcttccagagatgaggcattttcggacaccaatgaacatcagtaccggttcctgaaaagtgcattcagaaaaaacatggaaaaagaaagagaaaaacacctgtgataaactagagtgagaggtgaaggattgtgatttatatcggactgacggggtggggggatcatgacagcatctatccgcctaaaacagcgggcccgcaaaaactgcaggcgtattcctcccattttcccatcgttgagctggacgcgagcttttacgcgatacagcccgcccgcaataatgaaagatgggtcaaagagacgccggaatcttttcaatttgtcattaaggcatatcaaggaatgacgggtcatcagcgcggcgatattccctttgaatcgaaggaagaaatgtttgaggcgtttaagctgtcattatcgccgtatatagagcatggaaagcttgccatggtgctgttccaattcccgccgtggtttgactgcaagaaagaaaacgtcgcatatttaagatggtgcaggcagcagatgggcgatatcccgtgcgcgcttgaattccgcaaccggtcttggttttctccgccattttacgaacagacgctttcctttatgaaggaggaaggctggattcacagcatatgtgacgagccgcaaatcggcgagggcagcattccgaccgtcctgaaagcaacggatgaagaaaaaacgcttgtccgttttcacgggcggaacaaacagggctggatcaaacctgacggcggacaaaattggcgtgaggtcagatatttataccgctataacaaacaggagctcaaagattggaaaaacaatcttcaggagctgaaaaaacagtcgcgcaatctgtatgtgctcttcaataataactcaggcggagacgccgccgataacgggcttgagatgcttgaaatgttaaatatctcatataccggacttgctccgaagcagctcgacctattcagctagaaaagaggtttcaagacacatgtcttatcttattttgattatattgggatttatcgcgggaacggtcggcagcctgatcgggcttgggggaggaattatcatcgtgccggcaatgctctatttaagcacgatgactccgtttttccatgacgtaacaccgcagactgccatcggcacgtcccttttggtgattatttttacgggcctgtcatcaactctggcctatatgaaatataaaaccgttgactacaaaagcggactgatcttttttatcggttccggcccgggaagcatcatcggcgcgtatttgtctaaactttttaatgcgcatacgttttccgtctggttcggactttttatgattttgatttccattacattaatgctgaaggcgaaagcaaaaccggtcaataaagcgcataaaggcatgatccggacatatgaggatgaatcgggtgagctttatacatattcgtaccgtatttttaccggtatcgtgattgcctttttcgtcggtttattgggcggtcttttcggcattggcggcggctctcttatggttccggccatgatgctgttatttttgttcccgccgaaagtggctgtggcgacgtcaatgctcattattttcttatcctccgtgacgggttccgtgtcacatatcgcagagggccatgtcaattggctgtatgcgctgtgcctcgttccgggcgcgtggttcggcggcaaaatgggcgcgtgggttaataagcgggtgcagacgaaaacgatcgtgcttttcatgcgggtcgtcttgattttgatcggctgtgaattgatttatcaagggatattcagctaaaaggtaggagagatggtatgttagagaagctccgtttatatcatacgaatgatttgcacagccatttcgaaaattggccgaaaatcgtacattatattgagcagaagagaaatgaacatgaaaaagacggggaggaaacactcgtattcgacatcggcgatcatatggaccgattccaaatgataacggaagcgaccttcggcaaagcgaatgtcgacttgttaaaccggcttgagatcgatgcggctgccgtcgggaataatgaaggaattacgctgcctcacgatgagctggcggatttatatacccatgccgcgtttcccgtcattgtgtccaacctgtttgacgcggatggacagcggccggaatgggccgagccctacgtgatcaaaacactgaaaaacgggatgaccgccggcatactcggcgtcacggtgccgtattatcccgtctatcaaaaactcggctggacggtgacggatgcggaaaaaagcattcaagaatcacttgacgatatcaagggcaaagcggacatcatcattctgctttctcatttaggcctgatcgatgaccgggccgcagcggaaaaatttccggacatcgatgtcattcttgaatcacatacgcaccaccttcttgaggacggacaggacataaacggcgtattgcttgcatgtgcggagaaatacgggaactatgtcggctgtgtcgagctgacgatagaaagtgaatcacgaaccattgtcagcaaacaggcgtctgtacagaaaatggctgattggcaaggggaatctgaagatacggcggcttttctgaaagagaaggaacgggaagcggaaaacctgctctccgaacaagtcgccaacctgaatgaagaagccggcgtgaagtggtttgaggaatcgccgctcccgcttctattagccgaagcgctgaaaagctggtgcggctgtgaagtcagcatggtgaattcaggcgtcattttggggcctttacagaaggggcctgtcacaaaacttgacctgcaccgcatctgccctcatccgatcaatccggtcgccgtgcgtctttcaggcagggaactccaggaaacaatcagccaggccgcctcggaacaaatggagcagctgcggataaaaggcctcggcttccgcggggaagtgatgggcaggatggtatatgccggagcggaggcagaggccggcatccttgaagacggtgtgacgcatctcctcaatgtgaaagtgaacggagaagagattgatccggagcggatatactcggttgccgttctcgatatgtttacactcggaaagctgttcccttacatccgcgattcaaaagaaaagcaatactttatgccggagtttttaagggatctgctcgcctggaagctcgcgcggcagccgtaatgtcatgtagctgcccgccgttccatttcacccgaatgagtgaaagcgggactttttaagagtgaaaataaaatactatgtcccctcttacaagcatacattgtgatatgtaaggggggatttttcttgcctagataccggagcgctcttcgcaagagagggcctttgccttttcgatatgtgcttcttctgtcgtttgctttttttatcatatcgacggtcatcagcctttggatgatcaactcctcaatcaaaccggtgctgatgaacataggagaaatggaaaccaaacgggtggcgacagaggtcattacggaatccattgaagaatacatgtctcacagcgacaatgtgaaagatatggtcgatatgaaaacggatgaaaacggaaaagtcacaacgatggattttaatacacaaatggtcaacagtatgaaggcgaaagtgacaaagcagcttcaggctcatctgaaggaagcggagtcgaacaataagcagcatgaaacggaaaaaggcgcgaaaacggccgatgaaattatgatcgatattcccttagggcaggtcacgggaaacagcattctcggaaatctggggccgaaaatccccgtgcgctttaacctgatcggtgatgcgttaactgatgtgaaaacaaaaataaagccgtacggcattaacaatgccctgatcgatatcagtatttttgtggaaataaaagtgaaggtcattattccgtttgccagtaagacatcagtcgtgacaaataatattccggtctccattaaagcgattcaaggagaggtgccgcagttttataacggaagcggcgggtcaggtgtgacgccttccgtccagctgccgagtgaaaaacagaagaaagataaataaaaacacacagccgcaatctttcctggcggctgtgtgtttactttttcctgcggatttcttttcgttcccatgcccttaaatggggatacggatcaaaagaccattccgatctgccgttatctttatacatcccgtagtgaagatgcggcggaaattttcccgcggtgcccggcggtccgtacccggaactgccgacagagccgatcacctctccgggtttgacgatctggcctttatgcacaccttttgcaaagccgttcaggtgagcgaagtagtgatacgtgttattgatatccctgatgccgattctccagccgccgaaacggttccagcccttcatttcaacaataccgtagcaggtcgatctgacggggagcccgtaatgagcgaacagatccgttccttcgtgaatccggcgcccgccgaaaccccgtgcggcgccccatgtgctgcggtagctgtaatccgtcttcacgggaagcggaaaagcgtgctctccgagatcaaggcggccgaacgttttaaacagtgtcatgaattcggtgataatgccgaccgtctgatcacggcggtaataattccagagaccgatgcggatatggtcaagatcggttccgaatcccgctaaatactgagcaaatgtataaaggatatcctcatcattgcttacctcggcttttccgtcgccgtcgccgtccaggccgatcccgtcaaatactttaatgctgagaggcgcatcgtccttaggatttggattttcagggccgctccacaaatgatccggaatataaatgctgatgattcccgctttttccggcagatcctttcggttcgagcggacattttcttcatattgatcaactgccgcaagcacataccaaggaatctgcgtgactgcttcggctttgcggtacaactgcatccgttcgccgtaaacaagagccgattgttctttcccgcttgcagccggacagaaaactgaaaaaaggagaagagcagataacagaactttcacaacatgatctcctttcaggattgaatacaaatagtttgcggcaacaatccgagaaaatgtaagtaattctcttcccttgtcgagaaatttttcctatgttaaagtgactattgaatagaaatccgcaagttttatatccatcgtgaaatagaaatttttcgcacacgaacatgaataaagggttaatggagatgatggggaaatggcaaagaaagacgagcatctgagaaagccggaatggctcaaaataaagctgaacacgaatgaaaactatacgggtctgaaaaaattaatgcgtgaaaataatctgcataccgtatgtgaagaagcaaaatgcccgaacatccatgaatgctgggctgtcagacgtacggcgacgttcatgattctcggttccgtctgtacgagagcatgccgcttctgcgctgtaaaaacgggactgccgactgagctggatctgcaggaaccggaacgcgtagctgattccgtcgcgctgatgaatttaaaacacgccgtcatcacggccgtagcgcgtgatgatcagaaagacggcggagcaggcgtctttgcggaaacggtccgggcgatccgcagaaaaagtccgttcacgacaattgaagtgctgccatccgatatgggcggaaattacgacaacctgaaaacattaatggatacccgtcctgatattctgaaccacaacattgaaaccgtccgccgcctgacaccgagagtccgggcccgcgcaacatatgaccgttctttggaattcttgcgccgtgcgaaagaaatgcagcctgacatcccgacgaaatcaagcattatgatcggtctcggcgaaacgaaggaagaaattattgaagtgatggacgacctgcttgcgaacaatgtcgacatcatggcgatcggccaatacctgcagccgtcgaaaaaacatttaaaagtccaaaaatattatcatccggacgaatttgccgaactgaaagaaatcgcgatgcaaaaaggcttcagccactgtgaagcaggcccgcttgtccgttcttcctaccatgcggatgaacaagtgaacgaagcgtctaaaaaacgccaggcccaagcataagataagccgaaaaaacccaaaacgccgcaggttttgggttttttgtgatggagccgtttttgcagggaaaaagtcattcttgaataaggatcgtctgaaccgctacactggatataaagaggaaaaattctccgtccgtccgaaccgtctcattttgcaattgatggacagaagtcaatgaattatgatagtaaagagtgataaaagaggtgaagacatgattcttattcaaaatgccgagtttgaactcgtacacgattttaaaaacggctttaatgaagaagcgttcaaagcccgctattcggacatattaaataaatatgattacattgtgggagactggggatacagtcagctgcggctcaaaggcttctttgatgaccagaatcaaaaagcaacctttgaaacgaaaatcagcacattggacgaatacatttacgaatactgcaatttcggctgcgcgtattttgttttaaaacgaatcagaaaataattgatgcagaaggggatgctgtcacgtgtattttgttgacagaaataatatcgaacaaacactccgtttttttgagacccagctggcgctgtttgacagcacgcctgcatgggagagcgagatcgaaaaaagggcgcttgagcggatcagccatcttatgatcgaatgcattctcgatgtcggaaatgatatgattgacggctttatcatgcgcgatccggggagttatgacgacatcatggatattctgacggatgaaaaggtggtagctgaggatgaagggaataagctgaagcaactgatctcttccagaaagcagcttgtccaggaatatcagcacgccgatcatcaggagctgtttacgctgatcacgtcaaacagagatgtgctgaaagcctttccggcccgtgtaagaacctacctggaaacagaattagggcctgtttccgcatttaaataacaacgagtgagaaaatccacaggagtgttgagtatgaaggattataaaggatatttgatagatttggacggcacaatgtacaacgggacggaaaaaatcgaagaagcgtgtgaattcgtgagaacgcttaaagcgcgcggcattccgtatttattcgtgacgaacaattcttcccggacgccgaagcaggtggcggacaagctgatgagctttgacattccggcatctgaagagcaggtcttcacgacgagcatggcgactgcgcagcatatcgcccaggagaaaaaagacgcgtcggtgtatgtgatcggcgaagaaggcatccgtcaggccattgaagaaaacgggctgagcttcggtgaagaaaacgcggactttgtcgttgtgggaatcgaccgcggcattacatatgaaaagttggcaacgggatgccttgcgatcagaaacggcgcccggttcatttcaacaaacggcgacgtcgccattccgactgaaagagggcttttaccagggaacggttcgctcacatccgttttgacggtgtcaacgggcgttgagcctgtctttatcggcaagcctgaatccattattatggaacaggcgatgcgtgtgctcggaacggatatttccgaaacactcatggtcggcgataactatgcaacggatattatggccggcatcaatgcgggcatggatacgctgctggttcataccggagtgacaaagcgtgagcatatggcagattacggccaaaagccgacatatgcgattgactctttaaccgaatggattgaacatctataaaaaagggacggccatgacggccgtccttattctgtatttctggcgctgtgagcaagccggcttgaagccgctgctgcgattgcgccgacgatatcatcaagaaacgtatggcattcgcccgtagatttatcatttaaccgcccgagaataccgggtttttctttgtcaatgtagccgtaattcgtaaagccgattgagccgtatatattcacgatagagaaggcgagcacctcgtcaaccccatacaggctttcatcaatcgccagaatggtctgaagcggttcagacagctttttttgttcggcgagcacatctaattctattcccgttaaaatggcgttttgcacctcgcgttttgcgatgacacggtccacattgagcctgcatacctccatcgtcaaatcaggatgatattttttttgaaggaaatacaccagctcggcaatatcgtccgtctcaaccccccgttcttttaaacgcgccctggcgacagcttccacctgattcagttgttccttttctgacatttgcttcacccaatctttttttactagtttatacaacactcttccgatgtgtacgatgtttctccacttgattcaaaggattacaatatgtattcataattccgccggcgtatgactacgatgtgaatagctctaatttttcaggcaggtgattatgatgaaaagcatcattaaagaaaaatacggcatccacgtcagacagctctccgtttatcagaaataccaatgcttccagacgcctaattccttctttcttataattcccgtttccgggttttcgcaatcagagctgacggagctttactacatgagtcagtatttacaagaacaaagtgacccatacgtttcagtgtttatctttacgaaggaaggagaactgacctttgaggacgaaggcaaaacgtatgcgctcttaaaagcgccgattcccgtctcaaaccggtcgttttctgtcggaggggagcttgccgaatttcacagaaaagggcggggttttccgtacgaagtgaaagaagcgggcaggatcggccaatggaaggacttatggggaaaacgggtggatcagctggaatcattctggatgcagaaaattcatatgtctccgcttgaaccgttcgaaaagaaaatgatcgaagcatttccttattattcaggcttagcggaaaacgccattcaatatttagtggatacggagctggatgacaatcccggcgcagaagactcggggacaatctgccatcagcggatggaacgggatacctggtcggaggaatcattgatccgcattccgggcgattgggtattcgaccatgccgcccgtgatattgcggaatatatgcgcagcacatatttgtatcatcgtgacgacctgctcaaagatgggtttttgtttctgcaggaatatgagcaagttacgccgttatcctccttttccaaacgcctgttttacagccgcctgctgtttccgctccatttcttcgagacggtggagagctattacatttctcatgattctgaaaaacagttttacgaagagcagcttgactacattcttgccgactgcacccgctatgaacagtttttacagacatgtcacaacatgatgaatgtcaggtcggcgcaggtttttgtcccgcctgtggcgtggctcggaaaaggaatcagttcgtaagaaaatatgacgtaaaaatatttagaaaatagggaatcttgtcatatcagtgtgttaagcgttttcatagccgtagaaacaatattcagccgcttgtcaaaacaaatgcgggcttatataatatttgtaacttaaatgtctgtgaagggttaacaattgtccttttctagtggacaaaaggaagaaaggtggagtttctctttggaagcgattcgtattggactgttaggactgggaaccgtgggaagcggagtcgtcaaaattatacaagatcatcaggataagcttatgcaccaggtcggctgtccggtgacaatcaaaaaagtgctagttaaagatattgataaaaaacgagacgcagacctgccgaaagaagtgctgacgacagaagtctatgatgtgatcgatgaccctgaggtcgacgtgattattgaagtcatcggcggtgtcgaacagacgaagcaatatcttcttgatgccttgaaagcgaaaaaacatgttgtgaccgcaaataaagatctgatcgccgtatacgggtcagagcttttagccgccgcaaaggaaaatggctgtgacttgtattatgaagcgagtgtcgccggcggaatcccgattttacgcacgctcgaagaaggcctttcctctgaccggatcacaaaaatgatgggaatcgtcaacggaacgacgaacttcatcttaacgaaaatgattaaagaaaaaagcccgtatgaagaagtgctgaaggaagcgcaggatctcggattcgcggaagcggacccgaccgccgatgtagaaggcctcgatgccgcacgcaagatggcgattttagcccgtctcggcttctctatgaacgtcgatctggacgatgtcaaagtaaaaggaatttcccggattacggatgaagacatcagcttcagcaaacggctcggctatacgatgaagctgatcggcatcgcccagcgtgatgacaataaaatcgaagtcagcgttcagccgacactgctgccggatcatcatccgctctctgcggtgcataacgagtttaatgccgtttacgtgtacggagaagctgtcggcgaaacgatgttttacggccccggagccggaagcatgccgactgcgacatcggtcgtttccgatctggtcgcggtcatgaaaaacatgcgtctcggcgtaaacggaaacagctttgtcgccccgcagtttgaaagaaatctgaagcagccgtctgatatctatgcccagcagtttttaagaattcacgtcaaagaccaggtcggctctttttcaaaaatcacatcggccttctcagagcgcggcgtcagctttgaaaaaattctgcagctgccgatcaaaggccatgacgacctcgcggaaatcgtcatcgtcacgcatcatacatcggaagaagatttcagtgacattctgcaaaacttaaatgacctcgaagtcgtacaagaagtaaaaagcacatatcgcgtagaagggaacggttggagctaatgtggaaaggactcatccatcaatataaagaatttctgccggtgacggatcagacgccggccctgacattgcatgaaggcaacacgccgctgattcacctgccgaaactttccgaaaagctcggaattgaactgcatgtgaaaacagagggcgttaatccgacgggatcctttaaagaccgcggcatggtcatggcggtcgccaaagcgaaagaagaaggcaatgataccatcatgtgcgcctctacagggaacacatccgcggcagctgcggcatacgcggcgagagccggcatgaaatgcatcgtcatcatcccggacggaaaaatcgccttcggaaaacttgcgcaggccgtcatgtacggtgcggaaatcatcgcgattgacggaaactttgacgacgcgctggccatcgtccggtcgatttgcgaaaaatcaccgattgcattagtgaattcagtaaacccttaccggattgaagggcaaaaaacagcggcctttgaagtatgcgaacagctcggcggagcgccggacattctggcgatcccggtaggaaacgccgggaatatcacggcctactggaaagggttcaaagaataccatgagaaaaacggcaccggacttccgaagatgcgcggttttgaggcggaaggttctgcggctatcgttcgcggcgaagtcattaaaaatccagagaccgttgcgacggcaatccgaatcgggaatcctgccagctgggacaaagcggtgctcgctgcggaagaatcagccggaaaaattgatgaagtcacagatgaagaaattcttcacgcttatcagctgattgcccgtgaagaaggcgtgtttgctgaaccgggctcctgtgcatccatcgccggcgttttgaaacaggtgaaatccggtgaaattccaaaaggcagcaaggttgtcgcagttttgaccggaaacggcctgaaagatccgaacacggctgtagacgtatctgacataaaaccgattacgctgccgacagatgaggacagtattctggaatacttaaatggagcggcgcgtgtatgaatgaggcggagatgctgttttccattacggttccgggaagcaccgccaacttagggcctgggtttgattccgtcgggatggcgctcagcagatatttgaagctttcggttttccgaaacgatgaatggcagttctcggcggaaaccgaaactgtcgcgggcatccctcaaggaacggacaacctcatctaccaagtcgccaaacggacggctgaccgctatcagaaagagctgccgcccgcccatgtcaaagtgtggagtgacatcccccttgcacggggtctcggaagcagcgcggccgctatcgtcgccgccattgagcttgcggatgagttatgcggcctgcagctgtcggaaagcgacaagctgcacttagccagtcttgaagagggacaccctgataatgccgctgcttctcttgcaggagggcttgtgatcggccttcacgaagaagatgaaacacatatcgtgcgtgttgccgaagcggatatcgacgttgtggcagtgattccgttttacgaagttctgaccagggacgcaagagacgtgctcccgaaagagctgccgtaccgacgcgccgttaaagcaagcgccgtcagcaaccttctcgttgctgcgatcatgtcaaatgactgggcgctcgccgggaaaatgatgagaaaagacatcctccatcagccgtaccgcgccatgcttgttcctgagctttcaaaggtggaacatgcggccgaaatgaaaggcgcctacgggacggcgctgagcggagcgggaccgacgattcttgtcctgattgaaaaaggaaagggagaagagctgagaaagcagctttctgagcatttcccccactgtgagattgcggcgcttaccgtcccgtcagaaggaagcgtaattgaacggaatcctttagagcaggtgaaaagtgtataatgataaaaaagcgttcttcccatcagagaaggacgctttctttttctggagaaggatttttatttagggaagcgaaataaaaaagaaaaggaggagatacgattgaaaaaactcataaccgaggaggacattgcgactctcgtatccgtgacagacccgcaatatgcccctgacggcagaagagccgcttacgtccggacaacagtcaatcataagcgtgattcctattcctcagccattatggtatatgacacagaatccggcatctcaaacccatggactttcggggacaacagaaatacaagtccgcggtggtcacctgacggacagcgcctcgcctttgtttctgacagggagaacggcgtccctcagctgtacatcatcgacgctgccggcggagaggcaaagcaggcggccgatattccttggggcgtatcagatccgatatgggcgcccgacggcagatccgtgcttgtgtccgtcagtctgacatcagcggagcgcgccgatgagaaagaaaaaaagaagcatgacgagtatgagccggttgatattcagtcattaacatataaacgtgacgggaaaggcctgctgaacggaagctgggcccagcttgtgctgattcatcttgaaacgggggagattcagcagctgaccgatcatgaagcggatcattatggcgcggccttttcaccggatggcaggcagcttgcgtttaccgccaatttatgcgagccgggtgacgccggaaagccgagcgatgtctatctgatgaatctggcggacggaagcctgaagcagattacgccgcaccgcggttctttcggtttctgcgtgttttcaccagacggttcttatatcgcgatgctgggccatgaaaatgaatttcgcaatgcgactttagagaaagcgtggctgtacgacgtgaaaactgagcggctctcctgcctgaccgacatgctggatgttcatttgagcgatgcgctgcttgcggattcaatcataggaggagtgacgcctcggccggtatggacaaacgacgggcagggtttttacgttctcgggagcgagcagggaagcaccggtatttattatatctcgattgacggcctcgtatatccgatccgattagaagaagagtatgtgaatggttttgcttttcatcctgatcagaaaagctgtatcgctgtcattgccaaacccgcacagccttccgagctttacagcatttcgctcgaagatggggaagagaagcaattgacatccgacaatgatcggtttattgaggagcgcatcatatccgtgccggaaaagctgcaatatgaaacaaaggacgggctgacggtaaacggctggtttttaaagcccgccgtttttgaagaggatcaaacttatccgctcattctatacatacacggcgggcctcacatgatgtacggccatacgtattttcacgaattccaagtgctggccgcacaaggatatgctgtcgtgtatgtcaacccgagaggaagccacggctacgggcaggattttgtcaatcgtgtcaggggtgattacggaggcggagattaccgtgatgtcatgcaggcggtggatgaagctgttcaggcgtatccgtttattgacagcggccgtctcggtgtgacgggcggaagctacggagggtttatgacaaattggattgtcgggcagaccggccgttttaaagcagccgtcacgcagcgctccatttcaaattggttcagcttccacggtgtcagcgatatcggtttcttttttactgactggcagctcggacatgatttgtttgaggaagcggataagctttgggatcgttctcctgtaaaatatgcgtcccgcgtttcgacgccgcttttgatcctgcatggtgagcgagatgaccgctgtccgatagagcaggcggagcagctctttaccgcgttgaagaaattgaacaaaacgacgtcgttcatccggtttccgaaagccacgcatgagctgtcgagaagcggccatccggaacagcggatgaaacgcatccgttatatttgttcatggtttgatgactatttgtaaaaaataaaaaaccaggctgtcatgcagcctggttttatgattaaaatacttgttctacttcaacgacacccggtacttcttcaagaagggcgcgttcgattccggctttcagcgtaatcgttgaacttgggcagctgccgcatgcgccaaggaggcgaagctttacaatgccttcgtctacgtcaacaagctcacagtcaccgccgtcacgaagcagaaacgggcgtaatttatccaatacttcctgtacttgctctttcatttcaacctcagtcatgagattcgctcctttcatatacataaaaccattatattcacagtaacggtaaaaatctaatgtttggtttgcaaagctgctttccccattatagcatatttaaacttgaacataaaaaccgttttttatacaaaagctgccccgtcctttgtatactggtgtaaaggggatgatatacatgacaaagccggttacgctcagtgtttacggcgctgaaacgctttgcgcaagctgcgtgaatatgccgagcgccaaagatacgtttgaatggctggaggcggcgctgcaacggaaatatccggaacagccttttcacatgcggtatattgatattgacgcaccgcctcagcaaaaggagacagaagaacttgcggagcgcatcagaaacgatgaatttttctatccgctcgtgctggtggaggatgtcattgtgggggaagggaatccgcatttaaaagatatatatgaagaaatggaaaagcgcggctatgttgcgggctcttaaaaatggccgctgatcgcaatcagcggcttttttcttatcagccgttgtgatgcttgtacatccataaaaggcctgattttaataaacggggcacacgcccgatgagcggacggtcgttgacaagaccgaagcccgctttttttccgagtgaaccgagaacgcctttcagcttaaattgcggcattgtttccggcagctcttcattgttccagcgtttcaggaggatctgcacaatttgttccgcctgtgcttcagccagctgggcgctcggcgcatgcggcaggctcgcgcaatcaccgacgacgtaaacatgctcatctcccggaaggttgtgatgcggtgttaaaacgatgcggccttgcggatctttttcagcgtccagttctctgacggctttattcggctgaattcccgccgtccacacgatggcatcggccggtattccttcatcatgattataaacgatcccgtcttccacttttgtaatattcgcattattgataatggtgacgccgtgttcttcaaaccatttctgaacatacttgctgagtcttttcggaaagcttgataaaatcaggtcgccccggtcaaataacataatcttcagatcgtcacggctctctcttaattcactggcaagctccacgccgcttaatcccgctccgacgatagcgacagatgcattggcgccgaggttgttcagcttttgataggcttcgcgtgactgatcaatggtctgaatgctgtaagtatgttccggcgcgccgggcacgttatgatacttatcctcgcagcccagtccgatcaccgcgtcatcgtaagaaatcggttcgcggtcatgaaacagaacctgtttgtttttcgtgtcgacggaagccacctcaccgtattgaacatccagattcggatgctcaggaaaagacaccctgatatgatgatcagaaatcgtgccggcggcgagcgcataatattctgtttttaagcagtgatacgggtttctgtcaatcagcgtgatggatatatctgacggaagctggttcggcagtaagcggtgcagcacccgcatgtttccgtaacccccgccgatcaagaccaattttttcataatgattccccttttgcccgaaaaatatggtagtcaatgttgttacaaaataacgaactatgtaaaataacatcttgaattatatcgaatttgatctaaaaccacaataatagttttaaaataacctacaaattgaccagaaaacacgtaatagtaaaacctttaacctgaattaatatgttacgataacattgagtgtgaaaccggatctttgacgaatagaggaaattccgttaggataaggtacatatgtgaggtgaaaccgcatgaatccgatgattgaattctgtgtcagcaatttagcgcgcggttcccaggaagcacttgagatcttagagaaggatccgaacttggacgtgcttgaatacggctgtttaagctattgcgggaaatgcatggagtccctgttcgccctggttaacggcgaagtggttacgggaggcacgcctgctgaactggttgacaacatatatacattcatagaagaaaatccgatgttttaatcagaggctccgaacggggtctcttttttattgcgccccgggttttggcaaaataaaaaatttgtagacagcaaaaataaatattgttatcttaataaagactttttttaaataaaattttagaggtggattcattgaatatcgtttgggggctgctcggggcagttgctatattagccattgcttttttgttatcagagaagaaaagcaaaattaacctgcgaaccgtcattgtcggtttatgtttacaaatggccttcggattcatcgtattaaagtgggacgccggacgggccgtatttttatggttctcaagccgtgtgcagcttctcattgattatgcgaacgaaggcatcagctttatttttggcccgctgataaaagtgggcagcagcccggcttttgcgctgagcgttctgccggtcattatctttttctcagcgctgattgccgttttgtatcacttgaaaatcatgcagctcatctttcgcgtcatcggaggcggactgtcaaaacttcttgggacaagcagaacggaatcgcttgcggcggctgcgaatatttttgtcggacagtctgaatcaccgcttgccattaaaccgctgattgcgggattgacccgttccgagctgtttacgattatgacgagcggcctttcggctgtagcgggttcgacgcttttcggttacgccctgttaggcattccgatcgaatacctgctggcggccagctttatggcggctcccgccggtctcgtgttcggaaaaattttaatacctgaaacggaaaaaacgcagacgataaaaggcgattttaatatggacgaagaaggcgaaggcgccgctaacgtgattgatgcagcggcaaaaggcgcgtccacgggccttcagattgctctaaatgtcggcgccatgctgcttgcgtttgtcgcgctcatcgccgtagtgaacggaattctcggcggaatcggcggctggttcggtttcaaacatattacattagaatccattctcggttacgtgttttcaccgatcgcatttgtaatcggcgttccttggcatgaagcgctcggagcgggaagctatatcggacagaaacttgtgctgaatgagtttgtcgcttattcaaacttcggtccgcatattgcggacttttctaaaaaaacgtctacgattatcagctttgcgctgtgcggatttgccaacttctcttcgattgcgattatgctcggcacactgggcggtttggccccaagccgccgttcggacattgcgcgcctcggattaagagcggttattgcgggaacactcgcaaaccttctcagcgcggcgattgccggcatgtttatttagtaaacgataaaagctccctgcatatgcagggagcttttatgtatgaaaaacgggggatatttgtattgtgtccgagcagaagagcttttatactaagtaaaagaaaaaaagttggaggccgatatgaattcattccgttttaccaagatgcacggtcttggaaacagttatatatatgtaaatcaatttgaagaacagctgccggaagaacggctggctgagattgccgttaaagtgtccagcattcacacgggcatcggctctgacggaatgatcctcatctgtccgtcagaaaaagcgcccgtcaaaatgcggatttttaataatgacggctcagaagggaaaaattgcggcaacggccttcgctgtgtggcaaagtacgcatacgaacataagctgacagaagaaacgtcctttttcattgagacgctttcaggtctagtgaaagcagacattacagaggacaacgggattgtgcgtgaagtcgccgttgatatgggcgaaccgcgcctcaccaaaaaagagctgccgatgctcggcaatgaagatgaacggacgatcgatgaaacctttgtttttggagaaacggagctttccggaacagccgtatcaatgggaaacccccatattgtttttccggttgcggatatcaatcaagcgcctcttacaacgctcggtcccgtcattgaaaaagacccgagatttccggaaggcgtcaatgtcgaatttgtggaatccgtcagcgccgatgaacttcatttccgcgtatgggaacgcggctccggcattacacaggcttgcggaacaggcgcctgtgcggcggctgtcgcatccgtattgaacggtgtttccgaacgaaaccgggatatcaccgttcatttagcgggaggcgaccttgtgattaattggcaggacaacgggcacgtgctgatgacgggacccgccgaaaccgtatgcagcggcgtctattatttgtaaacagctcgtttgagaaatactctcctcaaggtttataatagatatcagcatccgttttttaaaaaaggaggtctacctatgagtgttccagtaaccatcactgaagcagcggctttgcatataaaagatatgatgaaagagcatgaagaagaaaacgcgtttctccgtgtgggcgtaaaaggcggcggctgcagcggcctgtcttacggaatgggatttgagcacgaaaaaggcgaaaaagacagcatgtttgaacagcacggaatcaccgttttggtcgacagcgaaagccttgatattatgaccggcacgatcattgacttcaaacagtccatgatgggcggcggtttcaccattgacaacccgaatgccatcgcttcctgcggctgcggttcatctttccgcacggccaaaaacgccggtacgccggaagagtgttaagggtcaacccgccattcttaggatgaaaaaatatgacgtctttctttccggtggcgcttgcaccattgttaaaaaaggcgtttatctgtttaataaaaggaaaacccgctcaacagaagcgggttttcctttttcaaagaggttattcgattgtatgtttcatagcatggtacatatttgccgtatgttcatcggctttatcccgtgacatgcgcagccgttcttctgaagaaccatatccgatttcttgtttgccctctttcagtcctttaaaaatcccatcagcgaattcatccagcggttctccttgagtatgcagccctgctccgcctaaatctgtattcaccgccggaggcgcaacttcaatcacttctacagatgaatcagaaagctgatgtctcagactcattgtaaatgaatgaagcgccgctttcgttgctgaatagatcggtgcaatggcaagcggtgtaaaagccaatcccgaagagacgttaatgaaagccgcatcttcttttccggcaaaaaacggagcgaacagcatagacaggtggaagggagcttcaatgttcgttgtgatttctttattgaaatagtcccaattgtccttcgcatccgctttcagcacatgaaaacgttgttgaatccccgcgttgtttactaacacattcacttccggataattttctttcacccaatcaaacagtgatatacgttcagatggaatgctcaaatcactgacatatgtaataagatccgggaatgtttcctttgctttttgaagagcgtgctcacgccgtccggtcacgataactttatttcccgcttttaaaaaccgttctgcgaaagccaatcctattccggcatttccgcctgtaatcagtattgtatttcccgtcagtttcatattaactcctcttttccgattgtttttacatttctttgtcaacatttcagctttgatccaatcaatatattcatcccgcaaataggcatgaaataagacagcagtgattctgtaaaattgatttttagatcatcgggaaacccgccaaaactattctttccttgtcacaatatgatgatacggcttaaagcacggtttaagtcaacaaaagaaccttgtgcttccgtttcggttactcacatcagacataggtcacgaaaggaaaggtgaacgtaaagtcttggaattttcttaatgcgataaagcgtaccgtatcatatgggtgagaggcaattaaaaaaacgtttctgatcaaaacaaaaggacggcgatgcatatgcaggaaggaaacagcgttgatatcaggccgctcagcttgaatgatgcagagcaggaactggttttgcagacggaaaaccgcatgttttttgaacggtttgccatgacgagacaagaggatttttatacgctggaaggccggaaaaaacgaattgaacaatcactgaagaatgcgaaaaatgatactgaatacagcttcggcatttttcttcaggatcagaccctgattggcacgatcagcctttttcaggtggttcggggttccctccaaagcgcttttatcggttattttttagatggcaaatataacggaaaaggctatgcgacgaaggctgttaagctggcagtcgaatatgcattcaatgagctggaactgcatcggatagaagccggagttatgccgaacaataaggcgtcaatccgggtgctcgaaaaagctggctttcataaagaaggcattgcgagaaaaaatgtaaaaataaatggaaaatgggaagatcatcaggtgctggcgatcatacatccggaggatacatgacgatatcctccttttttatatcctgcgtctctttcgacagattcttcctaaaacttcaaatcaattgtctaaatcatactatttgcaaattcgaaaaaaaataaagggtacatagcaccaaaaactctgaaagatgtgctctttgtcaacacgttctaaagtcatatttttcgaaaggatattgattttttgataggattaaactaaattgtaaaagtatagaatagttaatttattttgtaagaaaaggatgataatatgataggtcaattgagcaataaaaaaatatttttaagttcttttttcatcattttgatctgttcattactcttccaattcagtatttcagataaagttctgcagtcgtattattcttccgtcggagaaaatacctacgatatcggggagaaaagtgttcgtacgattgtcatgtttctgcaagggtttatgatcttcacaacttttgtggaaattctgataggcggatttctgttattcgttgccgcttttattctcggtacaaaaaaaccgaaaaaaatatatttgcttctatatacgctgacttctttaatctcggcatttaaaatgttgattctttcagttgttaactacttaacggctgattcctcgcttatatattctgccggcggcaccagcttgagtctgcagctgctggatccatttctgctcatatcaatcgcggctctttatgctgctgcgggaaaactgaccgatctcagtaaaggcaagagaatcattttgactggatgttttgttttactaaaactctttactattttcttaaactattttatggcggataaaatttagctcgggagagagtcaattaagctgaattttattataaattaaaaaacagagtagggagatgttatgatgaacttagtaaaatctaataaaaagtctttcattttgtttggcgcggctcttgctgcagcaacattggtttatgcactattattaacgggaactgaattaaacgtggcggcggctcatgcattctcagccaatgctgaattagcttctactctcggcatctctacagccgcagctaaaaaagcaattgatattattgatgcggcatcaacaattgcttctatcatttctcttatcggtatcgttacaggcgcaggcgcgatttcttatgcaatcgttgcaacagcaaaaacaatgattaagaaatacggcaaaaaatacgcagctgcttggtaaaatcgatcaataaataattgctctttttgtacaagctgcaaaaagagcctctctcccaaatacatatgtaaggattgaaagtatgatagtcaaacaaattgcggctcttatcaaatataataccctgtcatcgtttcgaaaaagaaaggaagattggggcattcctcaactcaacagcaaactgctgtctgccattattatttctctgttatgtttatatctcgttttcctgggatgcggtgttgtattcgggacaaaactgattcagctgcccctcagcgcatgggggcaatttgttttaatcgccgtttcacttgagcagcttttttgggctgccggcttctttaaagaacaccacaatgcctttctgctggatacgcgcaaggtcattcatcaattaaaaaaggttcgttttttacagctgttttctgtttttgccggccaggcgatcaaaaaaaccattttcgtatggtatctttttgtttttccggtctttttgtttttatcaagcgcaggcatgaccgggtctgcggcggtcatcgtatttttcttgggcttcgtttattttcttctcaatttatttttatctatgctgttttcttatgttgtttatcttcttacaaatatgtggagcaaattgttttacttgaaaatcatgaaaggcattttattcagcgtcagcctgctggttccgcttgcagtcgggtatgccgtttatcttctcgtgtttggggagtataccgcaaaggatatttcaagctttacggagtcaccggctttccggaacatcctcatgaatacgccgtatgtatggttagcattccgctcacattccgtgctcgttttcgccgcggtgtttgcggccgccgtccttttaacggcggggatgtttaaactgtggtcggccacgctgaagaaaatggaccttattccttatatgtttttgacaaacgcagattttgcgccaaagctgaaattatatagaaataacaaaatatttcatgccgtttttcaaaaggacctgctgtttttatcgagaattgacgggttttttatcaggaacttcggcagtatgctgtatttgttcatgctgtttttaggtttttgtattccgcttctatcgcatcattttatcgggtattcggcagccgccatcgtgtctgcggcggttatcattgcgaacttttcgtatcagctcgtcggagatgcgctcaaaacagtattatcagttgacggggaaataaaaaatcagcatctgtttcaccgaaatatcaaacatgcgtggcagctggtgtttccgaaagtatgtatttataatctcgccgctcttatctattcgttcatcatcaccattttgattacggtgttttttccgtcttccgctgcgctgacgatttacttgtttattgtgtttttatgttcgggttttttatacagtcttgtccagatttcaagcaccgccctgtatcctaagaaaaactgggagcatatgtacgaaattggagaagcggggaaagcaaagacgtataacaacttatacggatctttcattttcattgtgtcgcttcaaatcgctgcgatcacgtcgtattttatctataaaaagccggaacttgaaacgatgcttattcattctgcatcaggtatttttgtcctgttcacactattaaactatggagtcatgtttctgtttcttcgcagaatcaatatggcggaaaggtttgcgaacaatgattaaattagtgaatatacaaaaaaactatagtgaaaaacaggtgttgaaagatatttcgtttgaggtgaaaaaaggctcaatttatgctttgctggggactaatggagtcgggaaaacaacgactttgaaaatcatttcgggcctgcttaaaccgacttcaggcagcgtcatgattgacggtaaggaactggattcagaagagggggggcaaatatcggctgatatcggttttgtgcccgaccatgcctttttatatgattacttaacgggagtcgaatacttgcgttttacagcggagatgtttgaagtaccgtctcagcggacaaatgagtatataaagaatatgttagagacgctgaagcttgctcaagacggaaatcagctgattaaaacatattcacatggaatgaaacaaaaattatcaattgcggccgcgctcattcatcagccaaagatattaattcttgacgaaccgctgacgggcattgatttaatcagcggtaaaacgatacggacgttattaaaggaatacgtcaaccagggacatacggtcctgttatcgactcacttgctggagctggcgcattcgctgtgcgatacgatcggtattatacatgaaggcgtttttgcggcggagtatcagtcatccgagcattcattagaagagattgaaaaattggctgagagtatttatacatgatgaaccgcatgttgccggcaatcaggacgtccgccattccgttaaccgcatcattgctgtttttttcaggcggtgtgatcgctgcgtttttttccgatcactttgtttcaacagcgtcttacaacggctcgtcaggcgcggttgaactgctgaaaaacaatgcaatcgcttgtctgtttttagccgcggggttttttacctttgggttgacctcaatcttttatttattcaccaacgggtttattttaagcggctctattatagaaaatctgcatagcggagttcctttttatcagatttttttactgctaattcctcatggtatatttgaagttcccgcgttattattaagtggcgccattggttttaagggcgttgaattggtcatcaggctgtgtttttctaaggaaaaaaagataatggcttcaatgttcaggcatattggaatattggtgctcataattatttgtctgctgatcgccgctgccattattgaagcttacatcacaccaatttttaagtaaaaggggcagaaatcatatgagaagtaaattatcattaatcggtgtgccgattgttatgattatcggttatatcatttctttatcctttgagtggctgtttcctgttcttacttttggggtggcaggactgtatctctttatatttgcaccggtgcaaaataaattcattcgttacatctttttgtttatttttgtgattaatctgttggccagtgcggctctttatttcggtatttaataaaaaaatgacattcatattgaatgtcatttttttattttttttttgcggctctgctgcgtgttaaaatctgtcgccgttgaaaatagagttttttacgatcacgtagtcgacattgcggatggcttcgagtgtattgccgccggcgtaagagatggaagattgcagatcctgctccatttcaaccagcgtgtcctgtaaagaccctttatgttcgacatgcatttttttgccttcgacgtttttcttttcgcctttttgaaattcagaagcggagccgaaatattctttgtacagcttgccgtcgatttcgatcgtttgtcccggtgattcttcgtggccggcgaataatgatccgatcatgaccatggatgcgccgaatcggatggatttcgcaatatcgccgtgcgtgcggatgccgccgtcagcaatgatcggtttgctcgccgcttttgcgcaccagcgaagcgcggctaattgccacccgccggttccgaagccggttttaattttggtgatgcagactttcccggggccgattcccacttttgtcgcgtcggcgcccgcgcgttccagctcccttacggcttcaggcgtcccgacattccctgcgatgacaaagctttccgggacatgttctttaataaattgaatcatgctgatcacggcattggaatggccgtgcgcgatatcaatggtaatataatccggcacaagctcctgtgctttcagctcccggatgaattcataatcattttccttcacgccgacactgatggaagaaatcagtccgcgcgctttcatatcccggacaaaagccaggcgtttttccggctcgaagcggtgcatgatataaaaatacccgttttccgcgagccaggccgcgatgttttcatctattatcgtctgcatgttggccgccacgaccggaagtttaaacgtgcgtccgcccaatgtaactgatgtatcacattcagatcggctgtccacaatgcattttgcaggaatcagctgaatatcttcgtaatcaaatacattttccatatataacacccctaaaagcgaataatagaattaaataaaattaaaatgttcgtctttttataatgtactttgttttgtcaggaatgtcaaatgatttcatgctgcctcatatgcggtcagcttgtcatccatttgcagtttggttatcatagtagtattgggtgttgtaagacatttgttacgatagatagatttgcaaagaagggaggggtcggtgtggaacaaaaacagcccgggcacagcccgaaagcccagaaaattcaggaccggattattttaggcacgatttgggtcgtgtcggcgcttgtcattgcgctcgttgtcggaaccgtcatgaattatatttggatgtttaaataaaaaagagtctgtgccggtatgacacagactcttttttatattatttttcaaacatgcttgtagaatgcattggctggacacgcgctttcgggtccatgtaggccttcgcgttgttcacggctgtcggagcttcgccgaaaccgctggcgatcagcttgactttgccttcatatgtgcagatatctccggcggcaaagaagccttcaatattcgtttccatcgtgcttttgacgacgatggaatttttctcgatgtcaaggccccagtttttaatcgggccgagagaagaaacaaagccgtagtttacgatcaggtcatcaatttcaatgatttctttacggtcgcctttcacttcttcgagaacgagctgttcgatccggtcttcaccgacaagttcagcgggaacaaacggtgtcagcacgttgactttagaattatgcaggttttcgacactgtgctcatgcgcgcggaatttatcacggcggtggatgatgctgacttctttcgcgatcggctcaagcatgagcgcccagtcaaccgcggaatcgccgccgcccagaacggcaacgcgtctgcctgcgaattgattgaggtcgtcaatgaagtaatgcaggtttttgccctcatattgttccgctgattccagctcaagctttctcggcttaaatgcgccgtttcccgcggtgataataaccgtttttgaataatgcgtttctgaattcgtgacaagcttaaacacaccgtccgcctgtttttcaacagattcaacggcctgctctaagcagatggtctgatcgaactttgccatttgctcttttaagttgttcacaagttcttgggcgcggattttcgggaatccggctacatcataaatatatttttcagggtacagcgcgctgagctggccgccaagctgaggcaggctctcgatgattttgacgctcgcctgtctcattcccccgtaaaaagcggtaaacaggccgaccgggccgccgccgatgaccgtaatatcataaacctttgaatcctcttgcataccaaattgcctcctaattgaaaattgttattaattataacatacaatttaaaaggatgacgagtgccgaaaaccgcccggccgcttcattcttgaaaaaaattgcggccgccgctaatatggggacaaattccaatctgttttttcctgaatgttttctgattcttccggatagtatggtgatatgcagacatgtgcggttttctaaaaaattttatatttcatttcataaaatcccgccaataagctgaagctaatacaaatgttgatttgattatgcgtctaacagcaaaaaaaagaaggtggatgtgatggcattgaataaacccaaaatcgtggttttaggtgcaggttatggtggattaatgacagtaacaaggcttccgaagcatatcggggcaaatgacgctgacattactttggtcaataaacacaattatcattatgaaacgacatggatgcatgaagcgagcgcaggaacgctgcatcatgaccgctgcagatatcaaataaaagatgtaatcaatgaatcacgggtcaaatttgtgcaggataccgtaaaagcgatagatgtgcaaaataaaaaggtgacgctttcacaaggggacatcccttatgattatcttgtcatcgggcttggcgccgtccctgaaacattcgggattaaaggcttaaaagaattcgcttttccgatcgcgaatattaatacgtcgcgccagctgaaagaccatattgagctccaatttgcgacatacaatacggaggccgaaaaacgtcctgaccgcttaaccatcgttgtcggcggagcgggctttacgggaattgaatttctcggtgaacttgcgaaccgcaagccggagttatgcagatattatgatatagatgaaagtctcgtccggatcgtctgtgtcgaggccgccccgacggttttgccgggatttgatccggagcttgtcgattacgccgttcaataccttgagagcaaaggcgttgaatttaaaatcggcaccgcggttcaagaatgccgcgcagacggtgtcacagtcggcaagaaagatgaagagccggaagaaatcaaatcccagaccgttgtctgggcggcgggcgtgcgcggacatccgatcgtggaggaagcgggttttgaaaatatgcgcggccgtgtcaaggtcaaccctgatcttcgggcgccgggtcatgatgacgtttttatactcggcgacagctcgctctttatcaatgaagagacggaacggccgtacccgccgactgctcagatcgcgatgcagcaaggagaaacggtcgccaaaaatctgggcggtttgattaaaggaggccagcttgaagagttcaagcctgacattaaaggaaccgtcgcctccctcggtgagcataacgccgtcggagtcgtatacggcaggaagctcaaaggcatgccggcgtcctttatgaaaaaggtcattgacaaccgatcgctctttatgatcggcgggctgggcctgacgctgaaaaaagggaagtttaaattcttctgaaaacccgcggccgcgggttttctcttcttttaaaaaagagcgctatcaaaagaatgtaaaagaaaaaaatgaatgttttcgcttacatgagttattttgttacatattctgacttggtgcttgacaagtaaatatgatatattatcagaaaattaagaaaaagggtgatccgcatgaaaacgacagcaaaaagcacggcggcgtgtccgttctgctcaggtaaagggtattttcaattgcttcttggcggctccgaaacatgtccctcctgccagggaagcggcaaagagagacgctgatttttccagacgttgacttttttaccgcccccgaggtacactgaaagtgctgtagggggtggatgtttgtgattagtttgccggttgtcctgatctcaattgtactattttttgtactgtttttcggcataggctttctgttgaacatgctgcttagaatgtcgtggattatggctgttgtctatccgattgtatgccttttcattatcagcaataaaaagatgatcagttacgtgcaggcgccgggggaatcctttcaaagcctgtttcagcgcatcatgtcattagcggttgcggatgtcgtgattttggcgggcggactggcgggagccatcatgtcaggcattgccataaaggcgctcagaaaaagaggatatcaaatgttttaagccgctttcttattcgagaaagctttttttgtgccgcggcgctttttgtatagcaccccaccgagttgggaacaatgactcggaggagagtgatttcagattgacgataatcagacgcgtattcatgatcgtgctctttttgggcgcatgccatgcgacatacttttccataaccggagttgaagcaaaggatctgacaaattggatgacggaacatcgcggcgccgttttgaaaaacatcggcactccgtttcaatccttacagaatcagccggaaaagaaggcatcaggcaggataaaaccgctggaagaagcttttgactgggaacgctatccgtcacaaaaggtgacggccaccggttataccgccggagcggaatctaccggaaaatctccgggtcatccgcagtacggaattacatattcaggcgtgaaggtcaaacgcgatttatattcaactgttgcggccgatccgtctgttttcccgatcgggacgattctgtttataccgaattacggatacggggttgtcgccgataccggctcaaaaattaaaggaagccgccttgacctctactttgacaccgtcaaggacgtctataacaattggggcaaaaaaacacttgatgtctacatgattaaaaaagggaacggcacagtgaccgaggacgaacttgtaaagctgaacgaaaccaagtcgatgcaagtgttcagaaatcaatacaaaacggtaaaagaataaaaacgcttcagcatccgctgaagcgttttttacataaagaaataatctaaaatcaatgtcagcacaataccggtgacgccgccgaagaacacttcaatcggctgatggccgagcagttctttcagtttcttctgtttttccttctcttccgctttctgaaagtccttcgcttcgctgacaaaccgattaaagtcgatgaccagtttattaatgaccgtcgcctgttcacccgcatgccgcctgacacctgtagcgtcgaacatcgtaatgacggcgaaaatcgcggcgactgcaaacaggggcgagtccagcccctgttccaaagcgactccggttgacagcgcagtgacggcggcggaatgggagctcggcatgccgccggtgctcgtcacaagagaccagtcaagttttttggatacgataaattgaataggcacttttacaacttgggcaaaaataatggcggcaaaactcgccagtaaaggaaaattcataagtacatccatatgcaacatcctttctgtatctgctgattccgatcgtatcgaaaaactgcagaaaacgcccttagtttggtaaaataaaatcaatgaaaaatgttttttcattataccactttacataacaaatacccacataaggagtgtgtactcatgttttatgcatctgatcaactgcggcatcccgaaacactggtcatcggtctttttcaaaaaagcacgctgaacggatttacgaaggaattggatgataaattggacggtcatctgacccagctgttaaaggatggtgatgtgtccgccaaacgcaatcgtgtatcaaaagtataccctccggctgcgaccggtatgaaacgtatttattttatcggcctgggaagagaagcggattattcgtttgaagatacgaaagaatgctttgcacgagtatttcagcagattcatcaagataaaaaacaggaagtatccgttttgctcgatacattcgtctccggggaagtgcctgccgccgatgccgctcatgcgctttcagaaagctgtctgcttgcggtttacgaagtgcaggattataaacataaatcgaatgagccggatcaggaactgaaatcagtctgcgccgtgaccgaagaagacctgagggaagtgcaggccggcctgaacgtcggagcggcatacggccaagggacgaattcagcccgcacgcttgtgaatatgccgggtaatatgctgacggccactgatttggcgtcatatgccgctgagctggcggcaaaatacgatttcgagtgtgaaattttagaaaaagatgaaatggaagagctcggcatgggcgggctgcttgctgttaacaagggctcatccgaaccgccgaaaatgatcgttctgaagtatcagggcaaagatcagtgggaagacgtcatcggcctggtcggtaaaggaattacctttgatacgggcggatattcaattaagccgaaaaccggcatcgtcggcatgaaaagcgatatgggaggggccgcctcggtattaggggcaatggagattatcggcgaactgcggcctgaacaaaacgtgctcgccgtcataccgtctacggacaacatgatttcgtccgatgcgatgaagccggatgatgtcatcgtttcgctcagcggaaaaaccgttgagatcctgaacaccgatgcggaagggcgtctcgtgcttgccgacggcatcacttacgccaagcagcacggagcctctgtccttgtagacgtcgcaacgttaacgggcggtgtcattgtcgccttagggaacgaaatgacgggcgccatgaccaatcacgccgcgttttatgaacaggtggcggaatcggcgaaagaatccggcgagccgatctggcagcttccgattacagaaaaggataaaaaacgggtgagaaacagtcagatggctgatttgaacaattctccgggaagagaaggccacgcgattatggcgggggcattcattggtgaattcgcggaaaacacgccgtgggttcatctcgatattgcgggaaccgcaacggcgaataaagcgacatgcttcggccctgccggcgcaacaggcgtcatggcaaggacgttggctgttttgactgagcgctttacgcccgaaagataacagtatcccgctgccttgatgcagcgggttttttgatttccaaaatctttagttgactaaagcgcagaatatatggtaactttaattatctactacattagcaaactaaaggattttggagggactcatcaatgaatgctgttgttgtcgcagtattgcttatgctcgtcttaagcctgctgcgtgtcaatattattatagctttaatgatcggcgcgcttgccggcgggctgaccggcggcttaggcctcggagagacggtgaaggcttttacggacggtctcggcggaaatgccaccgtcgcagtcagctacgcgctgctcggagcatttgccgcggcgctgacaaagacggggcttcccgatgcaatggtggaagcgtctgtcaaactaatcggaaaaaaggaagattcgcggaaaaaagcactgtcaaaagtattaatcgtactgattattttaatcatatcctgtttctcgcaaaacgtggtgcccgttcacattgcgtttattcctgtattgattccgccgcttttaaaaatatttaacgaacttgaaatagaccgcagactgatcgcgtgtgtgatgacattcggactgactgcgccttatatcgttctgcctgtcggattcggacagattttccaggggatgctgagagataatatggcgtcagccggtttaaaggtgccgctcagtgatatcccgtatgctttaatcatcccgacggccgggatggcggtcggtttaattttagccgtcatcgtcttccggaaaccgaagaaatatgagacgaaggagattgccggactatcgtcttctccttatacgaaaaaaagcattgccatcgccttgatctccattgccgtgtcgcttgccgttcagctctatctgtcacaagtgctcggagtggaaggtatgattatgggcgcgcttgccggcttgtttacgctgtttatcagcggagtcatgaagcgcaatgaagcggataagctgatcacggacggcatgattctgatggcttttatcgggtttgtcatgcttgttgcggccggtttttcaaatgtattgaataaaacgggtgatgtggcttccttggtcaaagcatcaacaggctttatcggccacagccaatcattgggcgcgctcctgatgctggtggtcggtttattaatcacgatgggaatcggatcatcatttgcaaccgtacccgttattacgaccatattcgttccgctgtgcgctcagctcggattcagcccgatggcgacgatcgccgtaatcggagcggccgccgcggtcggtgatgcgggttctcctgcaagtgacagtacgctcggcccgacgtcaggcctcagcgccgacggacagcaccaccacatttgggatacgtgcgtaccgacatttattttctataacattccgcttgtgatattcggctggattgccgcacttgtcctgtaaaaaaaggctcccggaaaggggagcctttttgtatgctgagaacatcttacgccgggtttctgctgaaccccgtcgctttatgaatagacctgtaaacggcaggcgcgattgatgccaataacagtgctaaaacgatatcttttatgaaaaaccatatcatgtaaaaccaggccattccgtagctgatcggagcatgaagccataattttagcgcaatatacgtataggtcgtgccaatgatataaatgacggcggtaccgatcaaagaggcccatgcataatgcaggcggccgggtttttttgttttttccagcagccatccggctgcaaatgccgccgggatataagcgagaataaatccgccgctctttccgataaacggcgcaaagcctgctgagaattgagcgaaaacaggcgcccccgcgagtccggccaatgcgtataccgtcattgcaatggctgcccgtctggcgccgagaagcatcgcggctaacagacaaaagaaaggctgcagcgataacggaattcccgcaacttgcaaaaaaggagccattgatgtaatgttggcgccgacggccatcagtgcggcaaacatgccgataagcgccatatcgcccgcgcgaaggttgcgttgtttcatttgtttttcccccttacacttgtaccagattagcgtaatcgaagggtgattgattgtcaacaaagatttaacacaggtttactaaatggagggagccatatgtttttcgggaaaacgaaacaaacaaaacagtcggaacggattccgccaaatcaaaatgtcacaacgaagtttcccgtgcttcacgccggaaatgttccttattatgaagatatgtcaaaatggaatctgcaagtgtacggacttgttgaccgtcctatgctgttaagctttgaagatatcaaatcctttcctgaagccgaagtgaaaaatgatattcattgcgttacgggctggtcccgtcttgataatatctggcagggaatacgcgccaaagacatcgctgagaaagcgggcgtgcacaaagaagcgggattcgtcattctgcacgctgaagagggctggacggccaacctgccgctttctgattttgcgcgggaaacatccctgctggcatatgcgcataacggcgagccgttaacgccagagcacggctatccgctcagaggcgttttcccccatctttatttttggaaaagcgcaaaatggctgcgcggcattcagttcacaaaggaaaaccaccccggcttttgggagaaaaacggctaccatatgaggggagatccatggaagaatgagcgctttacatgggattaagcccctatcactatatagttcttaggtaccttattgaaataaggtgctttttttatatcaaaaatccattgactttgtttggcaaaaaacctattatttgaggtgtcttttgatattgaaaatcattatcaataagcatagataaagcaattgccgcaaaggggatgaacacataatggacggaaaacaaataaagcggggtttcgcgccggccggccgatacgcggttccgggcacagaagtaagagaaatgcgctcaaaaggaggccgtatgtatcgtatctttgtctcttttcctcaggaagaaccgcctgcatccggcttccccgtcatatacctgctcgatgcgaattccgtattcggcacaatggccgaagctttgcgggtgcaaagccgacggcctgaaaaaacaggcgttgttccggcggtgattgtcggaatcggctacccgacagatcagccgttttccgccgaacgtcacagtgattttacgatgccgctttctgaatcagaactgccggtgcacccgcggggcgcggcatggcccgaacagggaggggcggaagcgtttctgagttttatagaagaagaagtaaagcccgcgatggagcgggattatccgatcgacagaggcaggcagacgattttcggccattcgctgggcggtctttttgtgctgcaagtgcttttgacgaggccggacatgttccagacctatgttgccgggagtccgtcaattcactggaacaagcgttttattcaggaaaaagcggaacgtttgtcagaccggctctctgcggaaaatcttcaagtcagcgtattgctggctgcgggagaaattgaaaaaacacataaaagcagaatcccgcagcacgcagaggcgctgtactctttattatccggatttgaagatgatggagtccgtgctgaatacagcgagtttgaaggagagggccatatttctgtcctgcccgttttaatcagcagggccctgcgtttctgcctgaatccgggaggaccgcataccccgtattctcccgcatgagaaaaaacaggcccttcgaactaaatgcggctgattctaattttctaattgactgcgtgttttgatttggatatgattgtcttgaatcatagttgataatgataatcattatcaatatagaaagggaatgataatatggacgcattgggaatgaaagggaaaacggccgttgtcaccggcgccgctcaaggcatcggagaagcaacagcgcttgcccttgctgaacaaggcgtaaatgtggcagctatagatacaaatcaagacttgcttctcgggcttactgacagacttcggaaaaaaggcgtgcaggcgcaggggtttgccgcagatgtatctgacagtgcggctgtcaatgatatcatcgccgccgttgaacgcgacatgggacctattgaaatattggcgaacgttgcgggcgtgctgcggccgggtccggtgcaatccctcagtgatgaagattgggatcaaacattttctgttaatacgaccggcgtatttcatgtgtcacgggctgtaagccgatacatgattgagcgtcaaaaaggcgccatcgttacggtcggttcgaatgcagccggcgttccgcgtgcttccatggcggcttatgcggcgtcaaaagcggctgccgtcatgtttacgaaatgcctcggactggagcttgcggcccatcatatccgctgcaacatcgtatctccgggttcaacggaaaccgacatgcagcgggcgctgtggcaggacgggaacggagcccgggacgtcatcagaggttcgcttgatacatataaaacgggaattccgcttcaaaagctggcgaagccttctgatattgcaaatgccgttttgtttctggcttctgaacaggcaaaccatattacgatgcatgatttatgcgttgatggcggcgctactttaggcgtttgatgtaacgagaaggagggacaaacatgacaaatcaacatttatcggcggaagtgtctgcaaaagaggtgctggacgcttacaagcccggggcgttctttttagcttccccgaaaagtacgatgcttgcggaaggaatgtttgcggaagtgcctgatacagacgcggaaaatcagctggattcactgcctgaacgcgtgagacagacgcttcttgaggcaaagcaagccggcatcaaacatccgattgcggccggcgccattccttttgacggcagaaaagcttcccggctttttgtaccgaagaatgtccatacggcaggcccgctttcgtttgcggaatcttccgcagaaaagccgcaatccaatacatatgacatccgtcccgttccggagcctgagggctttatgagcggtgtggaacaaggcgtattcagcattacggacggtccgctcagcaaaatcgtgctgtcaaggacgcttcatctgaccgctgaaaaggatatcgacattccacaggccgtcaagcatttggcgcagcacaacccgcgcggctatacattcgctgcggatgtgacgggaacgtcagaaacaagaaaaacgcttttcggcgcaagtcctgaactgctgctgtccaaaaacggaacatcgattctgtccaatccgctggcaggttccagacctcgcagcacagatcccgccgaggatcagagaagagcggaagaactgctgcaatcagcaaaagatctgcatgaacatgccgtagtcgtggccgccgtggccgccgcccttaaaccgttctgccgtgtgcttgatgtgccggaaaaaccgtcactcattaaaactgaggcgatgtggcacctgtccaccgaggtaaagggagagctgcgtgatccgtcaacgacatcacttgagctggccatcgccctgcatccgacacccgcggtatgcggaacgccgacggatgcggcgagagaagcgattcaggatattgagccgtttgaccgcaatttctacacgggaatggcgggctggtgtgatgctgagggtgacggagaatggattatcgcactccgctgcgccgaagcggaaacaaggtctctccggctctttgcgggtgccgggattgtcgccggatcaaagccgcaggatgaattggacgagacctcggccaaattccgcaccatgctccgggcgatggggctttaccaagatgagttgtaaaaaaggagggaacggatcgtgctgactggattttcgccatggccggaagaatgggctgacaaataccgaaaagacggctgctggaagggtgagacgttcggaggaatgttgaaagagcgcgcggctttatacggaaatcaaactgccgtgacgtgtaaagatgtacattggacctacaaagaattagatgaaagggcagatcgtttagcggcggggctgcataagctcggaattcaaaaggaagaccgcgttgtcgttcagctgccgaatatcgctgagttttttgaagtgattttcgcgctgttccggctgggagcgctgcccgttttcgcgctgccttctcatagaagcagtgagattacgtatttctgcgagtttgcagaggcgaaagcatacatcattcctgatatgcattcaggttttgattacagggcgcttgccagacaggtgaaagacaaacttccggatttggcgcatgtcattgtggccggcgaagctgaagagtttcaagaactgagcagcctgcatagagagcctgttcagctggaagaggtaagcccggcggaagtcgcctttttacagctttcaggaggcagtacggggctgtccaagctgattccgcgaacacacgacgattacatatacagtttgcgcatcagcgcggaaatatgcggcttggatcaacacagcgtttatttggccgctctgccgacagcgcataattatccgctcagctcgccaggtgtgctgggaactttatatgccggaggccgggttgttctgtcaccgacgccgagcccggatgactgcttcccgttaattgagaaagaacgtgtcacgattacagcgctcgtcccgccgcttgcgatggtgtggatggacgcatccggttcgcgaagtgatgatttatcaagccttcaagtgctgcaggtgggaggcgccaaattcagtgctgaggcggcccgccgcgtgaagagcgctttcggatgcacccttcagcaggttttcggaatggcggaaggattggtgaattatacgagactggatgatcctgaagagatcattgtcaatacgcaaggcagaccgatgtccccttttgatgaggtaagggttttagacgatgacgggcgggatgtcgcccccggtgaagcgggacatttgtttacacgcggcccttacacgattcgcggatattataaagcgcctgaacataatgaaagatcattcacagccgacggattttatcagaccggcgatatcgtcaaactgacggcggacggctatatcatcgtcgaagggcgtgcgaaagatcaaatcaatcggggcggtgaaaaaatagccgctgaggaggtggaaaatcaccttcttgcgcatcctgccgttcatgacgcggccatggtttcaatgccggacgattttctcggggagcgatcctgtgtgttcgtcatcccgaaaggagaagcgccgaaaccgggagagctgaaagcatttttacgtgagcgcggattagcggcatataaaatccccgaccggattgaatttatcgcttctttcccgaaaaccggcgtcggcaaggtcagtaaaaaggatcttcgcgaaacgatcgcccaaaaagtaaagccggctgaaatcaaacaatcttaaaaaaggaagtgtttacattggctataccgtctattcccgcatatgcgctgccgacagcgtcagatatgcctgaaaataaagtatcttggacgctgaatccgaaacgcgcggtgcttctgatccatgacatgcagaattatttcgtcgatgcttttgcgaaaggtgaagctccgatcacagaggcgtctcagaatatcaaaaaaataaaagagcaatgcaaagcactcggcattccggtggtgtataccgcacagccgggcagccaagacccggcggaccgtgcgctgctgacggatttttgggggccggggctaaaaagcgggccttatgaagaaaaggtcattccggagcttgccccggatgatcaggacattgtcctcacaaagtggagatacagcgcgtttaaacggacgaatctccttgagatcatgcgtgaaagcggcagagaccagctcatgattacgggaatttatgcacacatcggctgtctcgtcacagcctgtgaagcatttatggatgatatccaaagcttctttatcggagacgccgttgctgatttttcttcagaaaaacataagatggccatcgaatatgcgtctcagcgctgcgcttacacagctttgacaaacgaagtgctggagctgctgggcggcgcgccggtttctggaggagaagagaaggtttccgccgtattgacaaaagaccgggtgcgggaacaaattgcggcgattcttcaagaatcaccgtctgatatttcggatcatgaagacctgctggacagaggtcttgactccgtcagaatcatgagccttgtcgaacaatggcgccgtgacggagctgaagtgacgtttgtggaactggcggagaacccgacgctggaagagtggtggagacttctttcttcccgatctcaaaaagtcttgccgaacgcagattatttataaagggagagaatagaatgcatgatacacaacagctgcctctgacaggcgcacaggccggtatctggtttgcgcagcagcttgatcctgataatccgatttacaatacaggcgagtacgttgagataaacggcgcgatcgatgtgaacatatttaaaaccgctctcgaacgcgtgctgacggaagccgcgtcattacacgcccgcttcgaggagggagcagacgggccgaagcagatcatcaatcctccatttgaggctgcgatcgatgtcatagatgtgagttcagaagctgatccgaagcaggccgcactcagactcatgcagacagatttggctgagcccgttgatatggcggccgggcctttgttccgcgacattttatttcaggcgggaccggaacgctttttctggtatcagcgcattcaccacattgcgatagacggctacggtttttcactgctggcacggcgtacggcgcaaatgtacaccgcaatacgggaaggacgtccggataacgggcgctccttcggttctttggaggatctggtaaaagaagatcaagagtaccgcgcgtctgatcaattcctgaaagatcgggaattttggatggagaaatttgcggatgaacctgatgtcgtcagtttggcagaaagagcgccgcgaacgtcaacacgttttcggagaagcacggcttatctttctgaaacggctttacagcatgtaaaagcgattccgaactggcatgaagccgtcacggccgcagcggcggtatatgtccatcggatgacaaacgcaggggatatcgtgctcggtttaccgatgatggggcggatcggctcaatttcactgaatattccgagtatggtcatgaatcttctgcctttacggctttctctccgcccggatatgaattttcatgaggccgtcagccaagtggcaaaagaaatccgaaacatccggcgccatcagaaataccgccatgaagacatgcgccgcgaccttaaattgctcggagaaaatcgcaggctgttcggcccgcaagtcaatgtgatgccgtttgactacgcgcttgatttcgccggagcgcgggggaccgttcataatttatcagcagggcccgttgatgatttgtcaattaacgtttacgacagagcggacggaagcggaatgcgtgtggactttgatgcgaatccggaagtgtacagcgccgaagatattgaaaaccatcaaaaacgattcctgcttctgttggaatccgctgtgaaagaccagacacaaaaaatcggcacactcaaccttctgcttgaaagtgaacgtctccgcgtactggaaagctggaatgacacgcgcaaggccgagaagcagaaaagtctgccggagctgttttacgaacaggccgtaaaaacaccggaccggccggcaatcatcaccgaaaacgaagagctcagctatgccgaattgaacaagcgcgcgaaccagcttgccggcatgctaaaggaaaaagggctcggaccggaacaatttgccgctttgctgcttccgcggtcacaggagttggccgtgggcatgctggccgttttgaaaacgggagccgcatacctgccgcttgatcctgattttccttctgagcggatcacatacatgctcaaagatgcacagcctgcatgcctgattacaacgatggaattatccggccgcatgccggaagacagtgatgcaaaaaggatcattctcgatgacccggatacggtaaaaaccgttgccgctcaaaatgctgactgtcccgctcaggcggaatgttcgcctttgcaccccgcttatatcatttatacatcgggctcaacgggcaaaccgaaaggtgtagtcgtcactttaaaaagcgtaagcaatttcctcttatccatgcgggaaatgtttacgctcggcgaacaagaccgcctgcttgccgttacgactgcggcgtttgatatttccggacttgagctcttcctcccgctcatcagcggggcggggtgcgtcatcgcacgtaaagagacgattcaggaaccgcgggcgcttgcgcacatgattcactcatacggtatttcaatcatgcaggcaacgccgacattgtggcattcattagtcaccaatgaaccggattctctccgggcgctgcaggtgcttgtcggaggtgaggcgcttccgaatgcgcttatgcatgctctgcttgaatcaggctgtacggtgacgaatctgtacgggccgactgaaacaacaatctggtcggccgcacagccgcttgcaaaaggccatacaggggcgcctccgatcggaacgccgatttggaacacgcgggtatatgtgctggacgccgcattgcagcccgtcccgccgggaatcgcgggcgagctttatatagcgggggaggggcttgccagaggttattataaccgtcctgatttaacagcggaaagattcattgccgatccgtacgggcccgcgggcgcgaggatgtaccggacgggagatctcgtgcgctggcgtgaggacggctcgcttgattatatcagcagagccgatcaccaaattaaaatccgcgggttccggatagaattaggagaaattgagtcagtgctgtcgaaatatccgggtatttcgcaggccgccgtcattgtccgtgaagaccagcccggagataagcggctggcggcttacgctgtcgcggatcagccccttgatatcggcggacttcgtgaatatatgggcgaaagcctgccggattatatggtgccgggcgcgtttgtacagctggaagaattgccgctgacaccgaataagaagctcgatcgcagcgctctgcctgcacctgatttttccgctgtcctgtctgacagagggccgcggacgccgcaggaagaaatattatgcgatctgtttgccgaggttctcggtctcgcgcgggtcggaattgatgacgggttctttgaattgggcggacattcgctcttagccggacgcctgatgagccgggtccgggagacgatgggcgcagagcttggcatcggccgtctgtttgatacgccgaccgttgccgggctcgccgcacagcttgacaccgcaaagagtgcgcggcctaagctcaagccgtttgaccggccggagcatatcccgctgtcatttgcgcagctgcgtctatggtttctctactgtcttgaagggccaagcccgacttacaacattccggtgattgtccgcatgtcaggcaagcttgaccaatcagcgctgaaacacgccttttacgatgttgtcagccgtcatgaaagcctgcgcaccgtttttccggaaaataagggatcatctcatcagctcattttatctgctgaagaagcccgccctgtgtttacagtgacacgtgcagacaaaaacgagctccaagacatgcttgccgctgcggcacgatatcggtttgatctcgctaaagagccggccgtccgggccgagctgtttgatcatggtgacggcgagtatacgctgatggttctcctgcatcacatcgcaggtgacggctggtccttgaatccgctcatgcgtgacttatccatagcctatatcgcccggcaaacaggtgaaaaagcagaatgggcgccgctggcgattcaatatgcggattatgcgctttggcagcagcagcttttaggcagcgcgtctgattctgagagcttaattgcgcgccagctggatttctggaagaaaacgcttgaaaatgtaccggatcagctggagctgccgtctgattttccgcgtcccgctgaatcaagctacaggggcggcgtcattccggtcaacatcggccaagagcttcatgcccgtcttctctcacttgccagaaatcagcgcgtaagcctgtttatggtgcttcaatcagggctttccgcgttactgacccggctcggtgcagggaccgatattccgatcggcagtccgatagccggccgcagtgatgacgcattaggagaccttgtgggtatgttcattaatacactcgtactgagaaccgatacctctggcgatccgagcttttgtgagcttcttgaaagggtcagggaaatgaatctcgcagcatatgaacatcaggacgtgccgtttgaacgtctcgtggaagaattgaatccggttcgttcccggtcaagacatccgctgttccaagtgatgctcgcattccaaaatacgcctgaccctgtactcagtcttcctgatatggaaacaagcctgcaaatcagcagtgtcggatcgtccaaatttgatttgacgctggaattggctgaacagcgccatgacgacggcacgcctgccggtattgaaggtctgctggagttcagtacggacttatttagaaaagaaacggctgaagcacttgccggacgcctgcttcttctgctcgaagatgccgcatcacatccggaaaaaccgatcggaagcttaaccattctttctgatgaagagcgccggaagcttttgccggttaaacgggcaaaacagcatattcagcctcggcagacactgcctgaactgtttgaaatacaggccgccgcaaaatcggatgaaacggcggcagtttttgaagagagcggactcacttataaagagctgaatgaaagagccaatcagctcgcgcacatgatgattgcccgcggcgtcggcccggagcagtttgtcgcactggcgctgccgcgttctttagatatgattgtcgggctgttagccgtcctgaagacgggggcagcgtatttgccgcttgatcctgattatcccgcggaccgcatcgcttttatgttacatgatgccaagcctgtatttatgctcaccaaccgtgaaggcgcaagtaagctctctggcgaaaacggcatgccggccttcatcctggatgatccgcagaacaaagaaacacttcggcaatatgccgtcacgaaccctgcggacgctgaccggattcggccgctgtcaccgcttcacccggcctatgtcatttacacgtcgggatcaacaggtgtgccgaaaggtgtcatcattccgcacagcaatgttatccggctgtttgagtcgacgcggcattggtatcactttcattctgatgatgtatggacgatgtttcactcctacgctttcgatttctctgtctgggaaatatgggggccgctgcttcacggcggacgtctcgtcgtcgtgccgcatgacatcagcagatcgccggaagcgtttttacatctcctcgtgaaagagcgagtgaccgtacttaaccaaacgccgtcagcgttttaccagctgatgcatgcggaaaaagaacacaaagagcttgggcgtcagctcgcactcagatatatcatcttcggcggcgaggcgcttgagctgagccggcttgagggttggtacagccgccacgcggacaatcagccggtgctcgtgaacatgtacggcattacggaaacgacggtgcacgtcagttaccttgaattagacaaaaacattgccgaactgagagcaaacagcctcatcggctgcggcattcctgatctgaacgtatatgtgcttgatgaccggctggagcctgtgcctccgggcatcacgggtgaaatgtatgtggccggagggggcgtggcacgaggctacttagggcggcaaagtctgaccgccgaacgctttgtggctgatccgtacggcccgccgggaacgagaatgtaccggacgggggatttagcccgtctgcggacggacggttctcttgattatatgggcagggcggaccaccagattaaaatgcgcggcttccggattgaattgggagaaatcgaagcggttctcgtcaaacatccggatgtcgaggatgccgccgtagtcgtccgtgaagaccggctgggagataaacggctggccgcctaccttgtccgatctgccggcagcaccttggacactggggacatgcgccggtttgccgaagaaagcctgccggattacatgattccgtcagcttttgtccaaatgaatgaactgccgctgacaccgaatggaaagcttgaccgaaaagcgcttcctgcgcctgacttccaaacggaggtcaccggccggggaccgagaacgccgcaggaagaaatgctttgtgagctgttcgcagaggtgcttcatctgccgcgtgtcggtattgatgacagattttttgatttaggcggtcattctttgcttgcggttcatttaatgagccgtattcgggaagcgatgggagccgagctgagtatcggaacattatttgaagctcctacggtggcaagccttgctgaaagacttgagtcaggaacgggcgcaagcgcgcttgatgttcttcttccgctcagaacggcaggagaagaaacaccgttgttctgtgtccatccggccggcggtctcagctggtgttatgccgggctgatgtcttctttagaggctgattatccgatatacggcttacaggcgagaggcatcggaaaaaaagaatcgcttccgcaaagcctagatgacatggcggcggattatattgaaaaaatccgtaccgtgcagccgaaagggccgtaccgtctgctcggctggtctctcggagggaatgtcattcaggccatggcgacacaattacagagccggggtgaagaggtttcgcttttggtgatgcttgacgcgtatccgaatcattttctgccgataaaaaatgcgcctgatgacgaggaagccgtcatcgcgctgctcgccctgggagggtacgacccggacagcctcggggatcagccgcttgattttgacgccgcgctgaccattctccgccgtgagggaagcgcattagccagcctggacgagtcagtgatgatgaatctgaaagacacgtacattaattctgtcgggctgttaggaacatacaagccgaaaccgttccacggagatgtgctgttcttcagatcaacgattattccggagtggtttgacccaattgagccggatacttggaaaccgtatattacggggaaaatcgagcggtatgacttagactgccgccataaagatatgtgccagccgggcccgcttgccgacattggcgcgattctggcagagaaattaaacggacggcgtacagtccggtaaagaaaggaaagagatgatatgacaaatccatttgaacgggaagacggctcataccatgtgctcgtcaatgctgaaggccagtactcactgtggccggcctatctggatgtgccggacggctgggaaacccgcctcacgaatgaaacccgccccgtttgtctcgaatatattgaaacaaactggcgtgatatgaggccggaaagcctgaaacaggccgaagccgctaaaatgtaataagaaaagcctgccgttatttcggcaggctttttatgcggacatcagccgttaagctgtgtatgatcacaaaatgtataagggtggccttcttcatccgtgcaccatgactgagacagaaaagccaaaaagaccgcggcccactggtctgcaaactggattaaaataccgccgtcgtgccacgttccgttatccttcttccagcgtgtatcaattgggtttccctgattcatatgaatattatgcatgccgtttgtcggcttgaacccgaaaatcttatcagcgcccggctccggcccgaatttagagccgtaaatatagacggtggctttttctgatttggctttttgcatgtacgtctcaataaagtcatttaagtcattatccggaccggtgacttcatgcgggaggggcaccatgttccggggatcaaacaatccgccgcggacataatccagcgccagctcacggctggtttcatcaattggggtatatccatacggaatgttgggcagcagggtgatcgcgcttgcatcaaaatgatcgcgtgccgcatacagaacctctgattcttttgaacttgacatgacattgatcgcacagcgatagcgcgtatcaggctcgcctagcacctcgacttgaaaatgcggagcatcatcatctgtttcccttttcatatctgacacagtgccttttaatacaccatagtgctgaacagccatatgaatcctcctttttcttccgggatatgaattgatattcgagacagggggccgtttttccttttatgagaaagaaaaaaggacagcccgctgatcaggctgtcctcttcatatctattaagcttttgcagccgaaccttgcattgctttttcagcaggcacgtagtcatagcctaagtctttggctaccgcttcatacgtgacatgtccgttagccgtatttaagcccgctttaagcgcagggctgtctgcaatggcttgtgccgcgcctttattggcgatttgaagcgcgtaaggaacggtcacattcgttaatgcgagcgtagacgtacgcggtacggcgcccggcatattggcgacagcgtagtgcacgacgccgtgtttttcgtaagtcggattatcgtgggttgtaatatgatcaacggtttccacaatgccgccctgatcgatggcaacatcaacaatgacggaacccggtttcatttgtttaaccatttcttccgtaacgagagtcggcgctttggctcccgggatgagcacggcgcagatcagaagatccgcttccgcgacggaatctgcaatatttacagggtttgacatcaatgttttaatctgatgtccgaaaatatcatcaagctgacgcagtcggtctgcgttcaaatcgatcattgtcacatcggcaccgagtccgacagccattttcgcggcatttgttccgacgccgccccctccgatgatcgtgacttttccgcgggatacacccggtacgccggctaataaaattccttttccgccctttggtttttcaagaaactgagccccgatttgcgcggccattctgccggccacttcggacatcggcgtaagcagcggaagggaacgtccgtccgttaccgtttcgtacgcgatagctgtcacgcctttttctgtaagcgctttagctaattccggctctgcagctaaatgaaggtaagtgaataagaccagaccttgacggaaatacgcatactcttcagccagcggttcttttaccttcatgaccatttccgcatcccatacttgctttctgtcctccagaatttccgcccctgctgatacataatcttcatttgtaaagccgcttccgagtcccgctccggattccacaagaacccgatggccgtttccgataagctgtgaaacgcctccaggtgttaatgccactcgattttcattgtttttgatttcctttggaaccccgataatcatgtctgtttcccccaatgtttgtgtgatgcttcaagtgtagcgcgatttttgcgaaaattctttgtttgaaacagaaaataaaaaaacacggatttgtgaaatttcacgaacccatgctgcgaagtttgatatcaaggtaaatcgtaaacttttcattcacattttttaagtcgatttctgcgatctggctgattcttttcagcctgtaattcaatgtattgacatggatgttaagcgctttagcggcggtgttgacattgctgtcggcatcaataaaatgttcgagcgtttttaccatatcggcttggtgctccctgtcatactgctcaagctttgacagggaatagttcatatagccgctgtgcttgcgtttttcatccaacacatccaggtactgataaatgccgagttccgaaaagctgaaaaggtgtttggtttctctcacaaaccgctctttcgcttttaatacggaaagcgcttcctgataggagcggtaaacataagaaatcgattcgtaaataccgccgaccgcaatcgacgcatcctcaattttatatcgttccttcagctgtttttgaatatgaagggcgaagtgctttacatctttaaaaggctgatcggttttcggcgcggctaataagattaattcatttgaatcaacagtcgccagcatgacatgaatctgctgtgtcgtttcctgcaaatattgcagctgctgttccgtcttttcagtcagctcatcatgtaaacggatgatcatgacgctgaacacggacggcagcgccattccgagcttatgaaacccttcggccatttcggcttcctgataaatatggccggtcagcattttccaaaaaaactcctggccccgctcttcgattttcgttttgcggatctgcaggtgcaaaagtttgttccgcaccgctttggctgccagctgaagtgtcttcagatcttcgtcattgagcttttttttgatctcaagcgcccaaataaatccgagaacctgactgtttttccagatagaaatcgccacgcggttgctcaggcccacctcgtcaatttctttcactttgatcggctggtccgtttttaaaagggccggaatggttccgtctttccagagtttgttgatgactttttccggcaccctccgcccgataatcgtcgacgtccgggccggatctgtacaatcgctgtgcgtgctgtatgcaagcagtttatgattaacgtcttctattgtaatggggcattgaagaacttcactgatatggtcggcaacatcttcaagcctgtcgaaactgtacttaaatggatcctttggattggtcatctgtatccctactttttcatagcttcatatcttgatcttaccatcttgcttttcagactgaaaggcatctttgcagggaaatagactaggacaataagatcattcgatgaaaacgaaaataataagaaaatcatactactacatttacaaaatgtgtaaatataccgaaaaatccaatatatcataagactcattttgtaaaattaaaacagatttgtttgactgtgccgaatggttgtttttataataatgacgttcaaaaaataagtgaattagcccatatttaggctgatgacacaggagggtataaggaatatgtctggattaattcgtgtcacacccgaagagctaagagcgatggctaagcaatatggcgttgaaagtcaggaagtcatgaatcaggttgaccgcctgaaccgcatgatttctgatttgaaaggcatgtgggaaggtgcttcaagtgaagcctttgcagatcaatatgagcagctgaaaccttcatttattaaaatgtctgaattgcttcaagatgtgaatcatcagctcgatcaaacggcaaatacgcttgagtctactgaccaagatatcgctaaccaaattcgcggataataagatgaatgaagaaacggagcgcctgattcaatcaagaagacggcgctctttctatgtaagggtgatatgaatatgtatatcgatattacaatagatttaacacattataacggcagcgtcttcgatctcagattgtcagattaccattctgtgaaaaaagtcattgatattgcccggcaggctcagcatgtatccgttccgccgcgtgaaggctattggatcagagtggtcaataaagaagcggttttttccggagaacaaaagctatctgactgcggcattacgaacggagaccgccttgaaattttatgaaaggacatggtggaatgacaggtcataacagatcttatttagaaacagaattagacgccgtccgagaagaaaccgaatcaggcttcacgttcaccttccagcgggaaaaaatcaagcttcttgacgggctggaagcaaacgtgattaaagatgctgatcctttttttcaaaaagaggtctcagtttcagaagacgaagtaaccatcacaatcaaacctccttcttcttatcaggctttccgctatataaaaggaaaagataaaaaaagcaggtggcaatttgcctaccgtctcgtccaagccgtgaaacagcataagctgaaacgtctcaatctgattgccgcccctgaaaatatcgtgtttgataaagcgctgacgccttactttcttcattacggcgtaaaggagagccttccgccttatgaggaagatagagaaagggtgttaaaagagctcaaagcctgtgcggcgcttgcagctgacggggcgtacaccttcgatgaatatttgaagtacaaggagacgcttcacttctctcctgaggtgaaaagcgtgctagaggcggagacgattgaagaactggaagaaaccattcaaaccgcaattgattccctcgaagaaagagacaagacatacataaaactgccgaaaaagaaatggaaaatccaaagatacgccggtctggcgcttgccgtcctccttgtgccgacacttctttactccttatacgttctgtttttcgcccagccaaagcaagaggcaattacggaaagcaaccgctattttttaaatcagcagtacagcaaagtcattgacacactcgccaaatacgatgcggaaagcctcccggaatctgtgcagtacgagcttgcttcttcttatgtggcagttgaaaatctgagggaagagcagcggaaaaacatcgggaatctggtcacgctgcaatcagacccgaagcatttcctttattggattgatatcggcagaggggaaaatgaagaagccatcaaaatcggccgcaatcttgagtacaacccgtacatctggctcggacttacaaaatataaacagcaattattagcggatgacagtatgaaagacgacgaaaagcagaaagaactggacgccgtggaaagcgagcttgcgaaggcgaaaaaagaggcggaggagcagcataaagaagcggaggaaaacggtgacaccgccgaagcttccgccggacaggatgaaagcaaacaagacaaagcgaaagataacaaagagaacgacaagaaagatgagaaaaaagatgaaaaaaaataacagcacacatcaaatggccgcaggtaacgatcaggctgtcaggaggttcgccatatgagtctgttatgggtcttttaccgagagcacgtacaaaagattcagctgtctgaactcccgccgtctcagccgattacgatcggtccggatatgaaagatacaatcacggtcggcacacttccgttacggcaaaacgccgcaaccctttatcgaaaagaaacagatcgttatgatgttttcctgggaaataactgtgccggcgaattgacaataggaaatgaaatgccctgccggattgaagaagagacgatgcggcttctgctcacccctgacaaagaagaatcctccgtttattttatcggcgggaaggatgagatcgttttctcatcagaaacagaggaagcggatatatacaaagagccgtcctccgctcaaacaggggctttttatctgcgaaagtcgggaggatgctggtctgtcatccctgatggccaggacgtttatgtgaacggaaaacttgcagaagctcctgaaaggctccgcacgggagatgagctgctgtggaattttctgcgtgtgaggctgacggaggacgaccttttagaaatcgttcatcacgaaaagcttcaaaccggtttaaccaaaacggtaaaaccaagcaccgaaatgaaaaagaaatacccgcaatatcgaagaacgccgcgtatggtctacgatcttccagaagaccgcgtttcattcagctttccctcgcaggaaagcgaacagaataaccgggggctgtggctcgtcattctgcctcctttggtcatgctgattgtaatgggggttgtcgccattatacagccgaggggcatattcatccttgtctctttggcgatgtttatgatgactctcattacgtccaccgtgcagtatttccgtgaaaaaaaccagcggaaaaaacgggaggaaaaacgggagcgtgtgtacaagcagtatttagaaagcaagcggaaagagcttcagacgctgtcggaaaaacagctgcaagtgctgacgcatcattttcccccgtttgaaaaaatgaaatatttaacttctgaaatcagcggccgcatttgggagaaatcgctggaaagcagggattttctgatgcttcggctcggaacgggcacggtcccggcaagctacgagatttcaatgagcggcggagaccttgcgaaccgtgatgtggatgacttgatggagcagtcgcagcacatgcagcgtgtgtataaagatatccgccatgcgcccgtgaccgttgatttacaagaagggccgatggggcttgtcgggaaacctcagatcgtcaaaaatgaaattcaccagctgatcggccagctcgcgttcttcaacagctaccatgatctgcgatttgtctttatctttcatgaggacgaatataaggaatgggaatggatgaagtggctgccgcaatttcagctgcctcatatgtacgcgaaaggatttatttacaatgaacagacccgcgatcaattgttatcgtccatttacgagctgctgcgggagcgggatttggaagaagataaagaaaagaagatcttccagccgcattttgtctttgtcatcacaaatcagcagctgatcgcagagcacgtcattttagaatacatcgaaggccggcatgagcatctcggcatctcggcaatcattgccgcggaaacgaaggaaagcctggcagaaaacattcacaccctcgtccgctacattaatgaagatgagggagacattctcattcagcagaaaaaagcggtgcagatcccgtttaagctggacaggcatgaacggacaaacaacgagcggttttcccggacgcttcggacattgcaccatcaggtcggaatgacgaattccattcctgaaacggtctcatttctggagctgtttcatgcgaaggaagtaaaagaaatcggcatcagacagaagtgggagacaagtgagtctgcaaaatcgctggctgttccgatcggctataaaggaaaagacgacatcgtctatttaaacctgcatgaaaaagcgcacgggccgcacggattgctggcgggaacgaccggctccgggaaaagtgaatttctgcaaacgtacatcctgtcattggccgttcatttccacccgcatgaagcggcgtttttgctgattgactataagggcggaggaatggcccagccgttccgcaagatgccgcaccttctcgggaccatcacgaatattgaaggaagcagaaacttcagtatcagggcgcttgcatccattaagagcgagctgaaaaaacggcagcggctgtttgatcaatatcgcgtcaatcacatcaatgactatacaaagctgtataaacagggagaaacggatattccgatgccgcacctgtttttgatttcagatgaattcgccgagctgaaaagcgaagagcctgactttatcagggagcttgtcagcgcggcccgcatcggacggagccttggtgtgcatttaattctcgccacgcaaaagccgggcggcatcattgacgaccaaatatggagcaactcacgctttaaggtcgcgctgaaagtgcaggatgcaagtgacagtaaagaaatcctgaaaaacagtgatgcggcgaatattacggtcaccggacgcggctacttgcaagtcggaaataacgaagtgtatgagcagttccagtctgcctggagcggcgccccttacatggaagatgtatacggcaccgaggatgacattgccatcgttaccgacaccggcttaattccgctgtctgaggtggacgcggatgatgcggcgaaaaaagacgccccggcagaaatagaagccgtagtcgaagaaatcgagcggattcaaaatgaaatgggcattgaaaagctgccaagcccgtggcttccgccgcttgccgaacgtatcccgcgcacgctttaccccgcgcaggaaaaagaccgcttcttcatcgcctgcgttgatgagcctgatcagcaaagacaggcgcctctcgcttatacgatgatggatgacggcaacatcggcattttcggctcatccggctacggcaagtcagtggctgccatcaccttcctgatgaacttcgcggaaggatacacgccggaagagcttcatatgtacatctttgacttcggaaacggcacacttctgccattggcaaagcttccgcacaccgcagactatttcttaatggatcaaatgagaaagatcgaaaaattcatgatccgcatcaaggaagaaatcgagcggcggaaacggctgttcagagaaaaagaagtcagccatatcaaaatgtacaattcgctcagtgaagaagagctgccgtttatatttatcacaattgacaatttcgacatcgtaaaagatgaaatgcatgaattagaaacggaatttatccagatttcacgcgacgggcaaagcttaggcatttacttcctgctgaccgcaacgagggtaaacgccgtccgccagtcgctgttaaacaacataaaaacgaaagtcgtccattatttaatggatcagtcagaaggatactccatttacgggcgtccgccgttcagtctcgaaccgatcccgggccgcgtgatgatccaaaaagaagaactgtatttcgcgcaaatgtttcttccggctgaagcggaaaatgacctcgagatgttccaggcgctgaaagccgatgtcaaagcattagctgagcgccacgccggaacagccggcccagacccgattccgatgcttccggataggctgacggccggcgaattttcactccgtctcggcccggatcaagagccgttccgcattcctgtcgggcttcatgaggaaaaggtcagccctgtgtactttgatctgggcaaaaataagcattgccttatcttaggccagacacagcgtggaaaaacaaacatcctgaaagtgatgctgaatcacctgctgcgtgaaggtacggaacgggtcgggctgtttgactcgattgaccgcggactgtcgcagtatgcgcaggaaacaaaggtcagctatctggacacaaaagaagacgtccggcagtggatcgaaacggcagaagccattttcacggagcgcgaagctcagtatgcgcaggccgtcaaaaatggcgatgtgtacaaactcagtttctctccggtcgtgttaatggccgacggcattacaagattccagcagacgatcgacaccgccattcaggacaagctggcgatgtttatgaaatcttacgcgcatgtgggcttcagttttatcccagcgggcaatcacagcgaattctcaaaaggttatgattccttaacgacggaaatgaaacagatccgccacgcgatgctgcttgtgaaaaaatccgaacaaaatgtcattccgctgccttaccaaaggcaggaaccggacattcagccgggcttcggctatttggttgaaaacgggaaagagcaaaaaatccaaatacctttatgttcagcggaaagggaggccgtcagatgactgaacaacgaaaaagcctgatcaaattaatagccgcggtcgtcatcattctgctgctgccggtgctgtttttccggtttatcggcgatgacccgggaaaacaaaaaatcaacgccacccgccaaatcgcagtcgtgaatgaagacatgggcttacaaacagatgaaaatgaggaagaggaatccgtccatttcggcaaagaagtagcggccgctctcggcggccgtccggattattcatggacggttgtcaacaggagcgcggctgaaaacggtctggcggctaagaagtatgacgccgtcgtttacattccatccgatttttcaaaagatatcttaagctatgacaaggagcgtccgcaaaaagccacgctgacattcaatattcaaagcaacctgaacgccgtcaacaaagaaaaggtgcagcgtgagctagaagacgcccaaaaatcaatgaataaaaaaatgtcggcattatattggaatttcgtctcgcaaaaagtgaacaatgtccgaggcgattttgacaagatcgtcaataaagaatcagagtttcaaaacgtcatgtacaacttttacaagccgagctccaatgacttggcaggtgaaatcaagcggcaaaaagacctgattgacgaactgaaaaaatcaatgaatgaagcgcagggcgcggcaaaagaaaaattgacctcggcagatgaagccaaaaccacgctcaaagactttgccgatacggtcgagcgctataaacaatatcaagaaaatcagaaaaaactgctgatggtcgcgcaggaacaaaatcaaaagcaaatcacaaccggactgaatgccattaaagcacagcaggccgccaaccagttcagcacgatgatgagcggactgtcctccggcataaaccgggcgcagacacagcttgaccagacgggatcggctctttctgccgcccaacaggtgagagaagcgcaggttcctgatcaggaacgcgggatggcgaatattcaatccaatttactggacaattatttgactcaatataaagctcaagcaagatttgaaacactgaacagtatccaaacccttatgaaaagggatcggccggcattaaccgttccggaaaaggacccgggtgatgacggctcggatgaaccgaaagaagaagaaaaaccggaagaagaaaaacccggcgatctgaaaattgaccttgacgatcagcgtgacgagttaaaacgcatctccgctgaaatcaatcacatttctgaaggattaaaagaaccggaaaaagaaaatccggcccctgaaaaaccgggccaaggcgatgacggtgaaaactccggcgataccgatccgaataacggaacaaatcccggagaagacggaaaaacggaagacggcacaaaagaagagcagcctgcttcccataacacaggcgatcaggagccaaaaaccgtccagaccgcgacagccgctaaaaacgtcactccgcctgctgatgagccggcggacgacccgaacgattctgaaggggacggcggcacggacatatctgaggcgaaagaaaggctgaaccaagccgcagagcggattcagcaaattgaaaaagagctggaagagaaacagcagactcataatgaagaactgaaaaaacgtctcgatgctcttgatgaagaaatccaaggccttcaagaccagattgatgacgtcaaaaaacgtgcaaagaaaaagctagaggaattgaaagaaacgagaaaacaagacttcaataccgtttacagattgattgtaagaacagaacagaacattttgaactacccgtcattggatagcggccgcaaatctgctcttgaacagatatttgccgctgacatcaatacaaaagtgatatccgatttaatgagttactataatgatttatccctgtatgaggcgacactctatcactctcttgacgcgggctcgctgcctgatgtgaaaaacagggtgctgaaagctcagcaaggcgaagtccaaaccgttctcgccatcaaaccggaagaaacggcaagctgggaaaatctaaaaaacaacaaaatgcagacagatgaagacatcagcaatttcattaaaggcatgaccgaattctcggataactacagctcgtatatcagagatgaacaagccggagtgctcgatgagctcgccagcatttcagacagcgcggcgaaagcatccgatcagctggctgaaggcgccgtgcaggaagcggccgcgttcagcggagacggattaaccggaacgatggcgctcggcgctcaggataccgtcggccgcgaagtcctgcaaatgtctgacacgatgggccatctgtcagaacgccagtccggcatcatcagctataccgacaatatgcagcaaagcgtaaatgatgtccagcataaagcggacaccctgaacagcaactggggcaaaaacgtcgattccacgaaattgatcagaaatgacgtgtacggcattttagggaacgcgctcgttgacggacaggaaaacggctatgtttacgattatctcgccaacccgcttaaaatcagtggagaggtgccggaagaccgggttcagaatgttccgccggtcgtcattttggtgatcgtcctgatcagcagtcttctgatcggctatttcagctcgtattatcagcaggcgccgcttcttgtcaaaggcgcgctctttgggattttaaacattatggtcggattgatgatcagtctgttcggtctgaatatctactcgcttccggacgatcagacgattaaatggtcagtctttacgattctcttgcttgcggcgagttcagcttttatccgggcagcctttgtcttcagctcaatcaccggatggattgcatcatccgcgctcattctcttttatgtggcgcctttgatcgacctgattatgccgaacttcacctttgacagtccggtttcgaaagtctatatcgatattcaatacggaacgggccatctgtttgcgatgggggtaacggttcttgcgatcattacgctgattgcggcggcgcttccgctcgtcattcggctgtttgcggaaaaaacggaggaaagtgatcagtcttatgaggcgtaacacgttcatggaaaaaggattgctgctgtttgctctctcctttttccttttccttccccaagccgcagccgcgaatgaggaaaatactgatgtcaagccgaatgaatatgaaaagaaagacattgaaattcgtacggattacctgcacgacgatgcctactccgaggaaaaaacggcgcttccgaaagaacagaaggatattacctttgatcagccggccgaaaacccggatgacaaactgatatcaaagttgtttacatcgtcagacacggagccgaatacgatcaaagcgcaatcgaaaaaactgggtatcacatttgccgagcctgcggtgcggcatacctcggcagatatggaaacggaggagaaaaagacttcttatctgctgcctgtcatttatgccgtcttgatcctcctcgggattgcggcgatgatctatttgatcccgaaagtcacggcgcaggaaaaggcaaagcggtaaacggatcgcttgtgtttgcgggaagacagcccgtaaaataagaaaaaaaggaggagtttcatgcagttttttcttataacaggcgcgtcaaaaggcttgggccgggcgctgacggaacaggcgctgcaagaaggagccgaagtcgccgcgctttcaagaacgataagcggggaaaagcgtgaggggctgacagaatacagtgttgatttaaccgatctggcagatacagagcggcagatgaaggcgattcttgatcaagcagaggagaaggggtactccgccgtcacactgatcaacaatgccggaatggtggaaccgatcaagcgggcgaaagaggcttccgccgaagaattgaaccgccattacacccttaatctgacggcgcccgttttgctcagccaaatgttcacaaagcgtttcgaagcgttcagcggcagcaaaacaattgtcaacatcacatctggcgcggcgaaaaatccttataaaggatggagcgcgtattgcagctcaaaagcggggcttgatatgtttacgagaacatttgggtttgaacaggaagatgaagagctgccggtccgcatgatctcattctcgccgggagtgatggatacagacatgcaggccgtcatccgttcttcgtcaaaagaagatttccatgacatcgagcggttccgcaatctgaaagaaacgaaaaacctcagaagtcctgaatacatcgccggcgtcattcactcactgatcgcgggcgagccggaaaacggacggatatacgatatcaaagaatttttgtagagcagcttttacgctgctcttttttgtttgtacaatcacttcggggtccggcggcatatgatgaatgaaacaacgtataaggggtataagaaatgtatcagatgaattgagtttcttctcgatttatgttaggattctaaaaatataaataaggaggggtttccatgagaaatgtaacgttaatggatgtcttcacccatccaatcgcacaaaagtatttacagcgttccggtgtcgcccatgcgatcgcctgcgcgtttcatgcataccgtcttgccgtaaaagcaggtgtcagcccggatcttgcggcgaaagcggctttactgcatgacgtcggccattatgaatggtacacagacggcaaatgggattatgaaaagtacagaagaaacgatatccatgccattaaaggcgcggaacgggcgcataagctgctcatccggctcggtgaagaaccgaaagcggcgaaggacattgcgctggcgattctgcttcacaccgattcctatctgcccgaaggcgaactggacaagaatacgctccagcaaatcgtgaaacaagcggatgaactcgatgaagaacccggcgggcatcaccattaccgccaaatggatcacacggccgcgctcaaacaaatccaaaagcttgatcagttaattgaccaagcccaatatcccataagaagctcagtctaggccactcatgcggccttttccgcttacataactccgcatgctcactaacaccttttccgctccgatagacgtactgtgtcaaagcctttgtccgctgcatatgctgaaggaaaacatagtaaaggggatcagcgaaaatggcccatcaaggaagcccgcaaatcgtctcgttagtggacccttacgtttatcagaccatccataaacttatcggctcaaggtttatcattcaaaccgtcagacgcattgtcagaggacggctgattgatgccactccggatcacatcgccattgaagaaacgcatgaccgtgtattttatatcagaaaccgccatgtggtttccgtcatgcctgattataccgaacgcgtgtaacagcccgaataaggcgcaaaccggaggcggccctatagaaccccggtgcgtcttcttttttgagatacatagatgcacggcggctttttttggtacaatcacagtacaagttcacatgacaataggaggaaaccgcttgttgaaatcaaaggtccatttttggacgctgcaaattttgctcgttttgctcattatttacgtatcaacgaaagtttcgtttatttttcagccgtttttcggttttatcaccactctgttttttccgattttgatctcgggcattttgtttttcatttttaatccgatcgtacgcctgcttgagaaaaaaatcccccggacattggcgatcctgctcatttatctcgttttcatcggcctgattgcctttatgttcaccgccatcggaccgattgtggcttcccaggtcacggggctgattaacaatttccctgattacattcatcagattcaagtcttgacggcgcaattatcccattccaaatggtttacgtggatgatgacgcaggattatgtgtcgatagaaaaaatccagcagtctctgacgggatttttacaaagccttccgcaaaatattacggcaagcctgtcggccgtgttcggcgtcgttacgaatatcacgcttgtcgtgatcaccgttccgttcattttgttttatatgctgaaggacggccggcggtttccgctcttggcggttaaaatcctgcctacttcctaccgggcggaaggtcgcaaaatatttaatgacttatatgtcacattggccgcctatttccaaggccagctgctgatttgtctctttgtcggaacggcatgctttatcggatattggatcatcggcctgcagtatgcgttaattctcgggatggtgatcgccgtcaccaatatcattccgtacctggggccgtttctcggggcggcgcccgcggtgattatcgcgtttatggattcgccggctaaggcgctgtttgccgttattgttgtcgttgtcgtccagcagcttgacgggaacctgctttctccgcttgtcatcgggaaacggctgaatacccacccgctcaccattattcttctgcttatcggagcgggcagtttcggcggcattctcgcaatgattctggccgtgccggtttacgcggttttaaaagctttcgtcttaaatatcgtccggcttatcaaacttcgtcagcggtcaaagctagaagacagccgcaagccgaaataaaaacgggcacaactcccgatgcagcgcataaaatgctgtaaagaaaagcggaggtgcgggtatgcctgcaattgtgggaccgatttatattatgagtttagccggagacgctgcggcgagcttcggtgacgtgtttgccatttctcccaaagccgttgaccactcaggcgcgggggcaggggcgtttcattccggagattttgtcaaagtcactaataaattcagcaaaacgcgctttgaagacatcgatgtgtttgacgaacctgattggtttaacgcgtgacagcctccttttaggaggctgtcgcttttttgtagtataatagaatcagtctttataaaaggggaattttttatgaaaatcagaaaagcgaatattaccgtgcagtccggaatgatcggtgatgtatatctgcatgaaaataaaaaagaacagcatacccttgtagccgttccggaacttgagtggagcacgatcatttcctatgaggaagagaaaaaggcgctggcgcagcggcttttacaatcattcagcaagctgattgaagaagaacccgccggagagctcgccggcaagatctcccattgggtggctgaaatgtaacgaagcggtttaccgcgtcccgtccggggagataattgtaaaacaagctgaggagggacaggccgatgagcgacaaaacggttgacctttatttacagcaggggatgtacggccctctgcagacgaaaccggatgaacgccatttatttttaggctcgctgcgtgaaagagtcatcattgccctgacgaaggggcaggtgctgcaaaagcagccgtatgaagaagtgaaacaggcgctgaaaagccgaaaagacgcggtgctctatataaacggaaggctcccgtatcatgcttattcaccatatatgaagcttgccgcacttgccggtgtccgaagctccgtcatatcggatcttcaattcgaaacgccgctcggcctggtttttgccgccgattatgccgtgaaccttgacggcatttacgtacaggatgacatttttcagcgctcactcctgaaatcttaaaagggcaaaacaccgtttgtcattttacaatgccaattcacttacaagtggagataggatataatggttttcatatgaatggcggggaggccggctatgaaaaaagcatttatatgcattgattatacgaatgattttgcagcagagaacggggcattaacctgcggagaacccgcgagacagattgaagatacgattgtcagtttgacgcaagcatttatagaaaacggtgattacgttgtctttgcggtagattcgcatgatgcagacgatgactttcatcccgagacacgcctttttcctccgcataatatcaacggcacggagggcaaagagctgtacggaaggctatcgcctctttatgagaaacataaacacgcaaaaaacgtaaattatatggaaaaaacgagatattctgcttttgcgggaacggatttagagctgaaactgcgggaacggcagatcactgagctgcatcttgcgggcctgtgcacggacatctgcgttcttcacacggcggttgacgcctacaacaagggctttcagattgtcattcatcaaaacgctgtggccagctttaatccggaagggcatgaatgggccctgtcccattttaagaacagcatcggagcgcaagtggcagagtaaggaaggggaaaataattttggtggagcatggttttaaagacgacagtttgtctttacatacagatctttatcaaattaatatggccgaaacgtattggagagacggcattcatgagaaaaaagcgatttttgagctttttttcagaaagcttccctttgaaaacggctatgcggtatttgcgggcttagaaaaagcaatcgaatacttggagaacttcaaatttaccgacagcgatctgaattatttaaaaacggaattgcactatgctgatgatttcattgagtatttacgggatctttcttttaccggatctctttacagcatgaaagaaggcgagctcgtttttaacaacgaaccgattatgcgggtcgaagcgcccctgatcgaagcccagctgattgagacggctctgcttaacattgtgaattaccaaacattaatcgccacgaaagcggcccgcattaaaggcgttgtcggtgacgaagacgccctcgaattcggaacgcggcgtgcccatgaaatggatgcggctatgtggggagcgagagcggctctgatcggcggcttcagcgcgacgagtaatgtaagagccggaaagcgttttaatatacccgtatccggcacgcacgctcatgcgctcgtacaagcgtaccgcgatgaatatacggcatttaagaaatatgcggagacccacaaagactgcgtgtttctcgtagatacgtacgatacgatccgttcgggcatgccgaatgcgattaaagtcgcaaaggaattcggcgaccggatcaacttcatcggcatccggctggatagcggggacttggcgtacctttcaaaaaaagcgcgtgaaatgcttgatgaagcgggtttcacagacgcaaaggtcattgcttcaagcgatcttgacgagcacacgatattaaatctgaaatcgcaaggagcgaaaatcgatacgtggggcatcggcacgaagctgattaccgcatacgatcagccggccctcggcgcggtttacaagcttgtcgccattgaagaggacggcaaactgactgacaccattaaaatttcgtcaaaccctgaaaaagtgacaacgccgggaagaaagagagtataccggattatcaacaagctgaatcaccactcggaaggtgattatatcgcgctttatgacgagcgggtaaatgatcagaaacgcttaaaaatgttccatcccgtccacacgttcgtcagcaaattcgtcactgatttctatgcgaaagacttgcatgagccgatttttgaaaacggcgttttatgctatgataatcccgaaattaccgacatccagcaatacgtgcaggataacctcaaacttctgtgggaggaatacaaacggatcagcaagccggaagaatatccggtcgatttaagcgaagactgctggagcaacaagatgcagcggattcatgaaatcaaaagcgagctgaaacgggaacttgaatagaagacaaagcggcctttcctttctctggaaaggcctttttgttgtgataatatttttcacatttagacaaatttcgtcaagttatttgatatacttatgttcgaaggccgcatctaagggggtaaatgaatgaaggtgtttgttgcgagacagcctatcttcaacagaaacgaacaggttgttgcttatgaacttctttaccgggagagcgaagagaaccgttattcggccgctgatggagataaagctacgacggatctcattattaacagctttatcaacatcggaatcgaaaagctgactgaggggaaacgctgctttgtgaattttacagaaagcctgatgttttcagatctccctacctcctttgatcctgaccagcttattatcgaaattcttgaggacataccgatcactccggcactcatctcaagatgcagacagctgaagaaattaggatatacattagcacttgatgatttttacgccatcaatccggaaaatgaagagttagtggaacagctgatgaaatatattgatattttaaaaatcgactttttgcaatcctcgcgtctggagcgcaaaaaaatcattcagacgtacagctgtaaaagtctgatttatttagcggagaaagtggagacgagaaaagattataaacaggcggccatagacggctttcacctgtttcaaggatattttttcagtgaaccgcgtgtcatcagcggaaatgatctgacgtttcattttcattcttactaccagcttttaagcgaattaaacaatgaccagcccaatatacagcgcgtgacggaatacatagagcgggacgtcagcttatcgtatcagattctgcgttttttaaacggatcgcaaacaaggctgaaaaaaaagatagacagcatccagcaggccatcatgatgcttgggctgaatgagattaagcgcttgatttacattctttcattcagagatttaacggcgaaaagccactcaagccaaaaagaaatcattaagatttccttaatcagggccaaactgtgcgaactgctggcgaaaagaaccggaaggccccagccctcttcttacatgctgatcggcatgttttcgctcatcgatacgcttctccacagggagctggaggatatcatcaaagaactgcctttaatcgatgaagtcggacaggcgctgctcggttatgaaaacgattattataagatgctcgcgttcgtcaaagccattgaatgcaacaactgggactgtgacgagtggggaaaagaactgaacaaagaagaagcgtatgaatgttacttacaggcgatcgaatggtgccggcagctgatcgtggattgagccgctttaagccgaccacctgagggcgatggtaaaccggctttgctctctgatcagactgacacggatgccgtcgggattatacgtcacgtcaaagtcatttttgatgccggtctgcttaatgagccgcttgaccgctgcggtgtcagatgattgcgctgcggtgaggatacggcgcgcaagctcttttgacgccgacagccgcgcaaggagcaggcgcgcttcctccagcatgcccgcagcctcttttgcggacgctgtcaaaatatctgcgtgaaccggggcactgggcgcaggatgccggtatggcgcggcgaaaacaggaaagcatggatacacataatgcatacggcggcctccttcctgagaaaacattcgttatacatgagtataggcggcatgataacgagttatgacatgcaaaagaccacaatgcgggggttgcggtcttttcggtgtttgtcggtggttatgcgacgctgttcgcccattctgttttgaaattgcgacggcagggactatagtccttgccggtttgtcggaaaaccgttaaaaaaacagcagaaccgccagattggtctgcttcatcctaaacgtctgcctttctggtagttatatagtcctgttcgctaaatgctccattcgggactataggattaccccggtttgcggtgtcacgcagatacttttacacatacttttcggtgaaaaatcccgcaaaaacgtttacactattagtaacagatcaaatacctaggactcgttcaccatacacaattcattgatctttcaaaaaaaggagtgtggaaacggtggaaaacaaattagaagaagtaaagcaattattattccgacttgaaaatgatatcagagaaacaaccgactcattacgaaacattaacaaaagcattgatcagctcgataaattctcatatgcaatgaaaatttcttaaaaagacttggaaacaagtcttttttttgtgcattttttatccatttcgtggataaagtattatacgattgttaaaaaacgaaaaacctgctgtctttcatcacctgcatttagtaaaatagaatgggagggtgaagacaattattgagcaaatgtgtttagatgccgaaacgattaaagagaagatgaaggaaattgtggagcacaatatatgcaatactaacttgaaaatgtaccttctaaaatttattgcatcaaaagattcattcggatttgctgaattggcatatcaacattacaaagcgttcaatggcagagacacagaggcaattttaaagttagccgtaggcatagaattattagtcctgtcatacgacatttatgatgatttagaagataatgataatctgaaaatggaatggatgaaaacaggtctccccattacgctgaatactgtaacggccctctatacattaagtatacaggttatgaatcagattagtgaaaatccgtattttcttaagcaaatattaaactttgctttgaattcaattgagggccagcaagatgatattttgaatgcaccgcaaactgaagaagagtgcttgaaaatgattaagaataaatctggctctttaactgcaatgccttgcgttatgggcgcgatgctggctacaggaaagttaaatccaatcgttcaatcatattcatatgaactcggaataatatcccagattgataatgattatcaaggtttgttttacttgaataatgattttgttcaacgcaaaaatacacttgcttatttatacttaaaaaagagattcaataaagcttctgaagaaatcttacaatggtatgaaaacccggagttattcaaaaccttaaagactcgagacataaaaaagaaattaattgaagcaggtgtaacccaatacttattggttttgaaacatttgtcgttaaaaaaaataaaaagtaagatatttgaattggaaatagaaagaaataaaacggaaactttattaaatgcgattgttaatttagaggaggatgaaaaataatgcaggaaattgtaggatacttaaccaaaaatccagaagttttaaataaagtgattgaaggcaatgctagtctgattggagttagccaggatcaaacagattgtgttataaatgcgtttaagggtatagatgttatttctttcggcggtgattggaaatattgaggatgatataaatgaagtccaagtacaataagatttcagttgtcttaattctgcttacattggtatatgtcatttatctgacttatataagcacaaataatcttttagtcggcgccacaatttctgaaaataaacagggcgaaattaaaataaaagatgtagaagattttacaatggcatattacgccggagtgcaaaagggagatatagtaaagaatattaaccaccaaaatgtaaagtcaattaatattcaaatgaataagctgaaaaatgtaaactcgatggtcgttgatagaaacggtcatgatattgagattaagctcaatttatttaatgataggaacttcagtacttacttaataccgataattttttatgtagtatgtttattttgctgtttcttcatcatcaaaataaatgaagaaaaaaacttgaaatctgctttggtgctaattgtatttcttttgtctgcttcaatcgcatatattagtgctggaggatcggcaaaaggcgatttgcttagcagatgcatcatgttgttaacattaataactgtacctttaaattatcttctgtttctttatcattactttaaagaattaggtacagtgcttttcagcaaaaaagttttcgctttgtatttatttccaactataaatatattatttgaattattccggtcgcgattatcttttggtgattttattccaaaatttaatttgatttcgttttttcttctttttttgattgtagcatattactttattgttattttgagaagaaacaaagatactgatcaggcacatattataaaggtgcttgtggttataaatatattggcattttcgccttttttatgtctgtatcttataccgtatgtattttttaatgattattatgtctcttctttcttaacagcatcatttatgctgctgatacctttttcacttgtatatcaattcatgtcgaataaaatatataacgttgattttatcttaagtaagttaaaatattacggctttttagcgttaaccccaactataattctggttacgacaatagagttattacgtgagccggaagaaaatttttacaatctcaaactgacatttttaatttatattttaatgttagctgttttttattataaagaaatactcgatttccggtttaaattaaaaagggtttctgaaaggttcaattaccaagacagtatttataagtttacccaattaatcagaaactcgtcttctttaactcaggtttttggagaattaaaaaccaccattctcgaagtaactcttacaagtaaagtgtatatatttgaagttacgtatgatgggaatgtaaaggcatttgacgaaagagattcaagtttgatagatgattatcaagtgcttttaaatagtactggtgaaataggaaaaataacggagtttaatcaaggtttcgcaatgaaagtaggagaacggggagatagatcattcgttgttctctgtttgtctaagatgaatacgccccgtttatcacgtgaagaaatttcttggttaaaaacattatctttttacgttaatgtttcaatagaaaacgtgatgaaaatcgaagaacttatgaatcatctcgaagatttaaagaaacaagagacaaacccggtctggctcaaaaagctgatgtttacgatcgaggaaaagcagcgttcggatttggcccgtgatctgcatgattcagtgctgcaggacttgatttctttgaagcgccagtgtgagctgtttctggccgattttaagaaagaagagccttgccagttagaggtgcaggacaagcttcatcagatgaatgagcagatgtcggatgtcattttgatgacccgggagacgtgccatgagctgcgtcctcagctgctgtatgatttgggtctggtcaaggcggtatccaagcttgccgcgcagcagcaggagcgtgcgccgtttcatatccgtctgaatacgggccggtttacggcggcgctggatttggatacgcagctgaatttgtaccgcattattcaggaatttctttcgaacgccatgaagcattcacaggcgaatgaggtgctgattatgctgatcagcattcaaaataaagtgattctgcattatgaagacgacggtgtcggctgcaatcaggaaaaaggcggcggccagtcgatgagcatgggtctttcgggtattaaggagcgcgtccgtgcgcttgacggacggatgaaaatcgacacaagtgaaggaaacggttttaaagtagatattgaaatggaattgtaaccaatttatcaccaaatcgacttggcagaagccaagtctttttaataaaatggaaatgagtgagtaaaagggaggaaaccatgaaaaagatactagtgattgatgatcatccagctgtcatggagggcaccaagacgattctggaaacggacacgaatctttctgtcgattgcctcagtcctgatgccagtgaacaattcgttctccggcatgatttttcagcttacgatctcatattaatggatttaaatctgggtgatgacatcagcggcatagagctttctaagaaaatcttaaaagagaatcctctctgtaaaatcattgtctacacaggctatgaggttgaagattattttgaagaatccatccgcgcgggcctgcatggcgccatcagcaaaaccgaatctaaagagaaaatcatgcaatacatatatcacgtgctcaacggacagattttagttgatttctcctatttcaaacagctgatgacccagcaaaaaacaaaaacgtcttcttcccctcaaagtgagcaggatcggttaaccccgagagagcgccatattctccaagaggtcgaaaaaggtttgaccaatcaggaaatcgcagatgcacttcacttaagcaagcggtcaattgaatacagcctgacatccatttttaacaagctgaatgtcggctcccgcactgaagcggtgctgatcgccaagtcagataacgtactataaatcttgaagggagaatgacctatgaatctgaacaatacattgctcggcgcactcggtattgaaatcactgaaaacacaccggagagatgcgtggcggtgatgccggtggataagaggacggtgcagcctttcggatatctgcatggtggcgcgtcagcagcgctggcggagactgttgcaagtgtcggggcccagcattttatcgaccggtcgaaccaggcgtgtgtcgggcttgagattaatgccaatcatttaaaatccgtgaaagagggcgggacggtcacggcgattgcgaaacccgttcacacaggcagggcaaccattgtgtacgggattaacattttcgatgaacgggaaaggctgatctgtgtttcccgctgcacgctggctgttataacaaaataaacaaacagccggaaccctgaatcgtccggctgtttgtttttacaaatatgaatcttctttacgtttgatcacaaagtttctgatccctttgtaatcatcctgaacgcttcttttatcaagcgccgctcccgaattgtacgcggccctgcatatgaggtgcgctccgaccggcgccgtcagcaggataaaaatgatgccgagcagtatttttacagaaatttctccggtcagcatccacaagtagcctaacaccccgagcaataccaaattaacgccgagtgtcgagccttttgaagaggcgtgggcgcgcgtatacacatcaggaagcctgagtgtgccgaaagacgcgaccaggcagatcagcgatcccatcagaatacaaacggcgacggcccatttaacgatttcgatcattttcgataatctctcctttctccaaaaacttagcaaaggcaatcgtgccgataaacgataaaatgccgagcagcagaatgatgtccaaaaaggccgatgtgtttaagagaatggatacaagcgcggtcatggcaatcagattaatgccgatcccatcaagcgcgacgacccggtccggtatcgtaggcccttttatgacgcgaatgacgtacagaagagtcgaaaccgccataatgccgagtgataattgcagaataaacgtaaacatcagcggctcacctcctgaatggctttctcaaaagagacgcggatgtcatggatcgctttctccgcatcttcaatgtccatggcgtgtatatagagaatcgaccggtcatcggagatatccatcacgagcgtacccggtgttaaagtgattaacagcgagagcagcgtgatctcccaatcctccgtcaattccgtcttaaacgcgaaaatgcccgggcggatgttcagtttcggcgatataacggttttcagcacgctgacattggccaaatataattcctttataaagatcagcgccagtttgatgactgaccatattttccaaatataaaacggccgcgagaagaagcgccggaaaaaaaacagcgccgccaagcccgcgataaatccggtcataaaacccgccgcgctgaggctgtttgtgagaaacatccagcaaacagcgagaagaacatttaataatagttgaaaagccatgccatctactccttcaaaacagcttcaatgtatttttccggattcagcagattctcagccgtctgattgacatacggtgaaacccattcggttccgagcccgaacagaagcgacaaaaggagaaaagcggctgccggataaagaagtccttttgcggaccgtccgcctgcgccggggccggggatttctttttcttccccccaaaaagccgtcgtaaaaaccttcagcacggaatagagcacaagcaggctggataagagaatcaatacggaaaacaatgtttcccccttatcgaacccgccttccgcgatcttcagcttgcccacaaatccgctgaacggcgggatgccggccagagatatggctgaaataaagaacatccatcctaaaaggggataacgggtgatcagtccgcccattttatgcaggctggcagtgcccgtcaatgcgataagcgtgccggcgagcatgaacagcgctcctttaatcagcatatcgtgaatcaagtaataaaccgctccttgaatggaggccggcgtgttcatggcaatgccgaacaaaatcacgccgacggctgtaataatattgtagatgacgattttcatgacatccgaaaaggcgatagatccgattacgccgaataacaccgtcagcatcgcaagccacatcatcaattggtgggtaaagcccgtatcgtgaataaagatcagggtgaatactcttaaaatggcgtacaggccgactttcgtcaaaagagacccgaataaggccgaaatcgcagccggcggggcgtaataagagcccggcatccagaaatacagcgggaatatcccgccctttaaaccgaaaacgacgagaagaaggacgccgatgacggttatcagcccggtctggcccgattcacttatttttacgcttagatcagccatattcagcgtgcccgtcaccgcatataagtaaccgacgccgatgacaaaaaacgcggatgacacaatgttaaacacgatatacttcaatgattctcttaattgaattttcgttccgccaagcacgatcagcatgtaggacgcgataagcagaagctcaaaaaagacgtacatgttgaacaggtcacccgtcaaaaacgctccgcttacgccggccagaagaaactgcacccctgaataatagaaagcgcgctcccttttttctccgatggagcggaaggagtacaggatgacgagcagcccgattatggcggttgtcaaaacaagcagtgcggcaagctgatccgcggcgagcacaatgccgtacggcgctttccatccgccgagtgtcagcgtctgaatcccgtgtgtgaaaacggtctgaacgagagcggcgctgatgacgatggagacacaggaagcggcagtgctgaatatccgcatcagcatcacgtgcctgttcataaaaatcagcagcactgcggcaagcagcggcaccagaataggcaatatcacaaagttattcatgttgatcatttcccctcattcgatccatatcgtccgttttcagttcctgataggcgcgaaacgccatcacaagcaggaaggacgtgacgccgaacgaaataacgatcgccgtcagtatgagtgcctgcggcagcggatcgacaaacgacgtgctttttccgcccagtatgggaggggcgccttttttcagtccgcccatggtcagaagcagcaaatggacgccgtggcttaaaagcgcggtgccgataatcacgcgcagcagacttttagaaagcagcaggtaggttgccgccataaacaaaataccggcaatgacagacattaagatttccattattcttcctctccaatcgtttgaataatggtcatcgtcacgccgacaacaacgagatacacacctaaatcaaacaaagtggccgtcgcaagctccgtattcccaagcacagggagatgaaaatggccgaatgtatgggtgagaaagggtgctccgaataagaacgaacctgcacccgttgcaatcgcgataagcagacccgcgcccgccacataaataaaattgacgggcaaaatcgatttgacggtttttaaatcaaaggccaaaagcaacagcacgatggccgaagacgtaatcagtccgccgacaaatcctccgccgggagcgttatgccccgataaaaataaatagaaagagaaaagcagaatgataaaagatacaagcttcgttgccgtctgaaggatgatgtcgtttgtgttttgctgtctcaacgctcttctccctcctcttttactttcgttctgatcatgccgtaaataccgagtgcggcaatcgacagcaccgtgatttcaaacatcgtatcaaatcccctgaaatcaacgaggatgacgttgacgatattgtttcctcccccgagcttatggctgtaagcggtgaaaaaggaggagatgctgtcttttgttttttcgctggaagacgcgattccgagcattgtcacgatgacgccgacaccgagagaaatgataaaattcgtcatccggaatgttcttgtcttctttttccgccgcattttcggcagatgataaaaacaaagaagaaataaggcgacggatatcgtctcaatgacgagctgcgtgagcgccagatcgggcgctctgaaaatcacgaaaaacagcgcgagtgtgtacccgacaacaccgagtgagataatggccgtcagccgcgatttggcgaacacagtcgcaatcgttgcgctcaccataacgagggacagcacgatttcatacaggccgatttcagccatgcctttcgctgtcatggaaaagccgccttttgtgacgaacgccgttccgatgagaatgataaacgccgcaaagatatacagcagataatcccgcaaaaatccggtcatataagatgacgtcagctggtaagatcttttttccatactgcccgtcaccgcatcgtaaagcttgttcagcgtcagttttttcggaaacagaccgtacaaacgctcccatttagacagcgttacgtaaccgatcgtgccgacaatgatgatgccgagggtcatcattacctcagccgtcaccccgtgccactgggaaatatggacatggaatgtatctccgccggttaacagagccggataaatggagttcatcgccggttcaatcaggctgtaagacaaaacgttcggtgcaaaaaacagactgacggcgcaagcggcaagaatcaccggcgaaatcagcatgccgagcggtgcttcatgcggcgtcttttcaagctgatcaggtttgcgcgcgccgctgaacgttctgaaaaacagcttcatgctgtagatgaaagtgaagacgctcccgatccatgcgagaacggggaacagcacgccccacgtatccaggctgaaaatatctgcatgagcaatccgcagcatacttgtaaagaacatttctttacttaaaaagccgttaaacggagggaggcccgccatggaaaacgttccgatcagtgaaacggtgaacgttaccggcataagcgccatcagtccgccgagcctgcggatgtcccgtgttcccgtttcatggtcgataatgccgaccgccataaataaacttcctttaaaagtagcatggttaattaagtgaaacacagccgcggtgacagccgccgtaaaatactctgaatgctggtaatgaagcgcggcggctcctgcgccgagcatcgatacaatcataccgagctggctgactgtggaaaatgccagaatcgcttttaaatcggtttgtttcatcgcattaaaggaagcccataccatcgtgatcagaccgactgaggcaaccgtccaaaaccagacgggtgaaaatgcaaaaaccggactgaatctggcaatcagataaatgcccgctttcaccattgtagccgagtgcagataggcgctgacaggagtcggcgcctccatggcatcaggcagccagatataaaacggaaactgcgctgatttcgtaaaggcccccaataacaggagaaccatcgccggaataaagaacggatggcctgcgataatatgcacctggttgaccatttccctgatactgaaagaatccgtcatcagatacagcaggataaagccgccgagcatgcacagcccgccgccgacggtaatcagcagtgacttttccgcaccgtagcgtgatttcttccgcttatgccaatacccgattaataagaaggatgacaggcttgtcagctcccagaacatataaagcacgataacgttatcgacgagcacaacgccgagcatcgcgcccataaacatcagcaggtacacataaaaggggccgagcttttctttgtccttcgataagtaaaaaatactgtaaagcgtcaccaaagagccgatgcccgtaatcaataaagcgaataacagcccgagtccgtcaagataaacggtatagttaataccgagggacggaatccattcggccgcatatcggacggtttccccagccattgttacagggagcttgctgataaagtaaacaaacagcacaacgggcactatcagcacaaaccagcctgtatggacttgttttacccgtttataaagaaagggaacgataaatgcaaataaaaaaggcgccaaaatcgcgaaatgtaacagctgcaacagaagacctcctttgcttgttttttcatcaagcaactgctttatgtaagagtgaattaatcaattcacggtcataggacccagtacaaattatatcgcacttttttttaccctgctacggcataatgtattcctctctgtgtttttgtggtcttttgaacccaaaataaatttatcaaatatcctgatctttgtatatacatttatctttcagatcaagcttttaaaaaaggagctggtcagatgaagagaaaggcggcggcctgtattggaatattttgttctattattgcaggaacattcatagcggacgatttctgcaaaacgcggcagcagacggaggcagataattgggagcgtttttttctcggtgcggaatacgcagaagacaagctgagtgcggctgaatcaatgcaaacaccgtttcagccgcgtgagtatatcagaatcgtatatagatgaaaagagttccggcaccagggtgcggaactcttttttgtggcaatcagcgttttcctttaatgtaagggatgccgttggctttaggcgcatccgcgcggccgatgaagccagcaagcgcgagaatggtcagaatgtaaggagccatcagcatgtatacattcggaatgtctttgaacaggggcaaaagcgagccgataatgctcaaactctgcgcaaatccgaagaacagcgccgccccgagcgcgccgatcggatgccatttgccgaaaaccagcgcggcaagagcgataaagccttgtccggaaatggtggagtgcgtgaaatcaagcgcgatcgtggaagcatatacaccgccgccgagcccgccgaacagcccgctgatcatgacgccgatatagcgcatgccgaacacgttgattcccatcgtatcggccgccatcggatgttccccgacagaacggatgcggaggccgaacggcgttttgaataaaataaaccaggaaacaaaggccagtacgatggctaaaatcgacgtataatatacgtcggaaaagaaaatctttcctaaaaccggaatatcgcttaacccgggaatgttcgttttgtaaaagggctccgggattttatcagtctgcgcctttccgtagatcagcttgacgataaacagtgtcgctcctaacgcgagcatattgatcgccacaccggttaccgtctgatcggcgcggaaagaaaccgcggcggccgcgtgaatcagtgagaacagtccgccggcaatcatagccgcagccaaggcgagccacggagcggcggcgccaagctcgcgtccgaaaaataagttgaacatgacgcttgtaaaggcgccgataatcatcagtccttcaagaccgatgttgacaactcccgatctttcagaaaacacgccgccgagagcagttaaaataagcggagccgcatatacgagtgttgccgggacaataatggataaaatctgcaggaagtccacttacttcgccccctttttcttcaatttatcaaggatgagacggatggcgtagcttgatgccacaaacaaaataataatggcgatgacgatgtcaacgacttcagaaggcaccccggattcaatcggcatatttaatgccccgactttaaggccgccgagaagacatgccgccagaacaacgccgattgccgtgctgccgccgagaagcgcaaccgcaatgccgtcgaagccgacgccggtaaaggcgcccttaaccgccgcgtattgaaaggttccgagtccttccatcgcgccggcaagccccgcgaaggcgccggaaatcatcatggcgtacatcatattttttctgacgctcattccggcgtattgtgcggcgtgctggttaaagccgacagcccggaattcaaatccgctttttgttttatgaatgataaaccacatgaggactgccgcaaacagagcgatcagaatgccccagtgaaggcgggagtaatctgtcagctgctctaaaaacggcgagcggagcgacgcgctttcatgaattttgtctgttttgtcccggtggtccgtcatgacatcggaaatgagataattggttaaatgaagagcgatataattcatcatgatcgtgacaatcacttcgtggacaaaaaaacgggcttttaaaaatccgggaatcaggccccaaatgccgcccgcagccgcagccgccaataacgaaagcggaaggtggatgtaagcgggggcgtcaaaggaagcgccgacccacaccgcggcggtccagccgacaaggagctgtccttcaaccccgatattaaacaggccggtccgaaatgcgaatgccacggccaatccggacaaaatatatggcgtaatctggcggattgattccccgatgtaatacacttctccgaaaatgccgctccaaagagccgaatacccgcttacgacattgtagccgctggcgagcatgatgaccgcacccgcagctaacccaaggatgatcgcaatcagcggcacagccagatgagaaagtcgattaatcatgtgttttccccgcctccatttgcttacttcccgccattaaaagtccgagctcctgctcgtttgtttcaagcggattgacgtttgcgatgatgctgccttcaaagatgacggcgatgcgatcgctgagattcattatttcatcaagttcaaaagataacagaagcaccgctttaccggcgtcacgctgctcaatgatctttttatggacgaattcaatcgcgccgacatcgagtccccgcgtcggctgggccgcaattaaaagatccggatttctgtccacttcccggccgataatggccttttgctgattccccccggagagagcgcgcgcaggcgtatattcatcaggtgttctgacgtcgtattcttcaatcaggcttcgcgctttgtcataaatcgtgtgtttatttaatatgccgaaagaagagtagggcttttggtaataactttgcagcacgatattttctccgatcggaaaatcaaggacgagcccgtgtttatgcctgtcctgcggaatatgcccgatgccggcttcagtgactttcctgggcggcatgttttgcagctgtttgccgtttaacgtgatcgtgccggcattcgtttttctgagacctgtaatggcttcaattaattcagactggccgtttccgtcaacgcccgcaatgccgacgatttcaccggctctgactgagagggagagctgtttgaccgcctcaacgccgcgcgcgtccttaaccgttacatcagaaagtgaaagcacttcttgtttcggctcggccgcttgtttatccgtcttgaatgacacttcgcgtccgaccataaggcttgccagttcatcttgatccgtatgtgcgacatcgagtgttgtaatgccttttcctttccggatgatggtgacacggtcgcagacttccataatctcttttaatttgtgggtgatgaggatgattgattttccttcattgacaagatttttcataatctgaatcagttcttgaatttcgtgcggggtcagcaccgcggtcggctcgtcaaaaatgagaatgtcggcgccccggtagagggtctttaatatttccgcccgctgctgcataccgacggaaatatcggcaactttggcttcaggatcaatgtgcaggccgtaacggtcggaaatatcgcgcacgtcccgggcggcgcgctgtctgtcaattcggccgaaagttttcggctcttttccgagaatgatattttctgagacggtaaaggtatccacaagcataaaatgctggtgcaccatcccgatgccgagatcgttggctctgttcgggctgttgatgtgaacgcgttcgccccgcacccggatctcgcctttttccggctgatacaggccgaataaaacgttcatgagtgtcgattttccggcgccgttttcaccgagaagggcgtgtatttcgccttttttcacttgaagcgtgacgtcatcattggcgacgattccgggaaactccttgcgtatattaagcatttcaatgatataatccaccgatttgacgctccttttcagagatactttgatgagaaagagcttggcaaaagaaaagctgcaagagatgcagcttttccttcaccgctcttttcataaaagagaggggataagcacggaagtctccttatcccctggttcttactcagccttgaaggatttcaattctttttcagttgaagggatctcgagtccgtccgcgattttcttcttccaatcgtctgttgctttgatgacatcgtcagaaaggttctccttgtgatccgagatgccgactgcatcttgcgccaaaccgtatgttaatgttttgccgcccgggaatttcccgtcacttgcttttttcgttaagtcctctacggctgtatccacttttttgaccattgatgtcagagtgacattgtcttttgtgcctttgacttgaccttccgcgtactggtctttatcaacaccgataacccatacgttccgcttcggatcttcttttttcagatttttcgcttctgtgaagacgcccgttcccgttgcgccggccgcgtgataaatgacgtcaacgcctgatttgtacatgctttcagccgtcgccttaccgacatcggctttgtcaaatccgcccgcatatttcacttcgacggtcgctttcggatttgcggcttgtacacccgcgcggaagccgatttcgaattttttgatcaattcagactccattccgcccacgaatccgacttttcccgttttgctcgatagcgcagcggccgctcccacgaggaatgaaccttcctgctctttaaatgtaaggctcgccacgttgtcttttttgacaacggcgtcaatgatcgcaaaattggtgtctttgcgctgatcggcgatttcgctgatggaatcctgcatcagatacccgacgccgtaaatcaggtcaaagtgttcccgcgctaatttatttaagttcgttgtataatctgcatctgattttgattgaagatagtcaaaaccgcttttgccttttgtaagcccgttgtcttttccgaatgcctgaataccttcccaggcggactggttaaatgatttgtcatcgacaccgccgatatctgttaccatgccgacggtaaagtttttgctgccggagccgtttgctttgtcacttgaaccgcatgcgcttaatatggttccggccgccgcgatgagcgccatcgccattccgattttgcgttttttcaaagatataacccccctgtaaaatatggctgtgccgttcaattcagacttgagtccccgtaccggatgcagaatcgaaaaaactttctgataataatgatgagacgtctctctttttcccgccttgagcggctgtctcttccgggttcgggacttatgacttatctgaaaagatctgctaaccaatcataatttatcattttacccgccataaataaatagaaatttgcttattttttaaaaaatatcaattttatgaatcggcttcctcatctggataaaacagaggaggatcagccaggtcattatccttatatagcatacaaaaaaggaatctcaagccttttgtcacgggatatgacagtaaaaaagcaccgttcacagcggaacggcgctttttgacattataaatattgtttgatgctgctgacattgccggtgttgatatgatattggaagacgggtctgccgatcgtgccgtacgccatttctacattcagcacttgtatgtcttccagaaatttaaggtatttccggatggagacttgcgagatttcagtatgcttggcgagatcttctgtggtaaaagagccgtcaccgaaagactcaatgctcgcccagatgagtttaagcgtgctttttgtcaatcccttcggaaggtgaaccttttccgccgcttctttcttttgaaaaagctcggcatccaattctttctgtgtcatgcttctgtgtgattgataaactttctgcttgcgtctgtagtcggaaagagcggtttgaaagcggtcaaattcaaatggtttgattaaataatcgacggcgccgtaccgaagcgtttttttgatgacgtccagctcgcttgcggccgaaatgacgatgacatcaaccgattcattttgtttgcggatttccgttaaaagctcaagcccgttttttcccggcatgtaaatgtcaagaaggatgagatcgatatgatgctcgctcagcacgtgcagcgcgctttgaaaggatgatgcgatccctttcagctgaaatccttcaatctggctgagatagcgtttatttaattcacccaccatggggtcgtcttcaactatgagtacattaatcatcattttcctccttcggttcatacggaatgcgaagactgaaagtcgttccttcattcttttcacttgtcacaatcatatggccttttaaattttctgttgcctgctgggtgaaatagaggccgaacccccggtttgtccctttcgtggaataaccttgttcaaaaatacgggcttggtctgccgcagacattccggctcccgtgtccgtaatctctatatcaagctggcgatcctgaaaccgcatcgagcacgtaatgttttttttcggcatctgcgccaccgcgtcgagcgcgttgtttaacaggtttccgataatcgtaatgagctcatggatgacggctggatccgccgcattcgggatcaggctgccgagctgaatgtccagatcagcgccctgttcgcgtatgtagctttgttttcctagaagaaaccctgcgagaaccggacttttgacatcacttataatctcgcttgtttccgtcttctgctgaatggcaatgtctttaatgtaagtgccgagatcatcgtattcttttaactggacaagccctaaaataacatgaagcttattcatgaattcatgagactgggctcttaatgcgtttgcatacattttaacaccggacagctgttctgctaaatgtttgacctccgttttgtccctgaacgtggcgatcgctccgacggtttgtcctttcagatgaatcggaacctcattaaagaccagctcaagcccgttaatgcggatatccctgtcctgaagcggttttttcgtttcaatcacttgtttcagccggcttttcgggagaatatcgttcacatcttgatcgaccggattagtcggaatacccattttaataaaaagccgtttcgcttccgcattggcgagcttgatttttccccgcgcgtcaaccgccagaatgccttccttcgttgattcgagcatggcgctccgctcttccaggagggtggcgatttcataaggctcaagaccgtacataatgtttttgacggtgcgggcgacaatgacggctccgatgacgccgacaaaaatacttacgcagatgatgaaataaagcggtctcaaactgtggctgacgacatcctgtattttgttaagcgaaattccgaccgaaacgacgcccacttgttttttatcttttccatagatcggtacgaaggctctcatggattttccgagagttcccgctgatgtgctcgttttgatatgcccgtgcatcgccggctgttcatctccgccggtgaatttcttcccgattttatttgcgtcggggtgggtgaggcggatgctgttcatatccatcaccacgacaaattcggttcctgtcgtatgctggacgtctaatgtataatcccggagctctttcagcccttttcttgtttgcaatgcccgcgcgacactcggtgtttccgcgaccagctttgcggtgcgcagcgcggtcgtccgttcttcttctttcacgcggtctgctgtttggacgctgatcgtgaaaaaggtgatacaaagtgcgataaggacgacaatacagacgaaaatcgttaatcgggtttgcaattttaatgtttttttcataacagccttccttacgtttatcattcccgcgttctactttactccgaaaaagccggtttgtgaagatcaggcccttatttcgtaaaagtgaggaaaaatggtattttttatcttgtcaatgtgttttaagtcctccataataagtgaggtagattacagaaagggactttttatatgaaaaatacttattggacgggttattttccgctcgttgcgattctgctatttagttcgtcattatccatttctacctcgctttatgtcatgaagatacttcagacgctcggcatgtatcaggggatgctggattatttctctgagaaagggatcagactggcgctttttgcagcgttcgcccttgtgtattttatgcttttttcggctttgaagctgattgcaaacacagtgacagagctgtctcttttgtttttcacaaatgaccctgaaggggacaatctgaaaaaaatcagattaggctctttaatttatgtaggcggaggaattctttcctttgcgctcgtgcagaatggtttttggattgcggcgttatttgccgttgttacgctcgtttatttgattttcatggtgtacagaatctattcgacactctcgatcgtttcgctgatcggttttatattgcttgagattctgttttggtttacttttgttatcggtattttgtacatctttatcaagctttataatagcataatggctagcttacctgtgtaagctagccatttttgttaagacagaaatctgtttttgatctcaggggaggggagcatgcatgcttccctttttccgaaccatttgtaacggcgccgggcgatgaaagaataggctctgtccctgagggggcggggcactgcgaaaaaaaccgctgacagccgccaggctccgcggagatgacgggaaacctttaacacggctgcggattttttgtatatccgcccgttttcgataaaaatcatgctgtcaaattgttctgtcggaagtccttctgatgccaaaagctcccgggcggtatctgattgcaatgaagcaaatgagattttgccggccggatcgcgtttaatgatgaattgaacggcgccgttgcataagttgcagacgccgtcaaacaaaagcacgcggtccggaagctgagctggtttcaaagcggatcccctccgttatctttaataagctgcctgcagcgtgtttttccagatcgaaagctgagggcttgcgtcatgaaggtattcgacgcttgacggtgtatcctttccgacccatacccccatcgtataagcgtccgtcaggccgacaaaccacatatcgtgatagtcatttgacgttcctgattttccgccgacgtacggagctttaaagttcgctttttttcctgttccgcttttgacgacggctttcatcatttctttgatctgcatgttggtccgcacgctgaatacctgcgtcggctcatctttccattttaatatcgtttttccttttaaatcagtcacttttgtaatcgcgtgactcggcgtataaacgccgttgttgccgaacgtggtgtacgcattggtcatttcaagcggagtcatgccgtttgtaaaaccgccaagcgccgcaggcagacggtaatccgcgctgaccagcttcgcgaaatgaaacggttcaaggtagctgaacgccttattgacgccgacgcggtccatgattctgatggccggtgtgttgtacgagtatttaaacgccgtttccagcgtgaccgtaccgtacgtgcggttattgtagttttgcgggcagtaatccgcactgcagaatttgcttgcgtcaatcttgctgtgtggcgttgcgccggtcttttcaatgtaaggtccgtaatcaagcagcggcttaatggatgaaccgggctgtctgtatgcctgataggcacggttgaaatcatatttatgataatctttcccgcctgaaagcgcgataatctgatgtgtctgatgattaatcacggccgctccgccctggacgcctgcatacggcagattttgattcacttgggcgacgacctggttttgcatatacggattcagcgccgtataaatcttcacgccgtcttttaacaatgtgctgactctgtctgaaagctcactctgtattttttgtttcgcctttccggaagctttttcaagacgtttgtcatagccttcggatgatgaaacaagctgtgtgaattcatcatttacataggaaacatagtcaggatatttatttgttttttcgtttatatcaagcttgatcttttccttttcggcttttttcagctgtttcccggatataacgcctgctttttttaatccgttaagcaatctgacttgtcgttttttcgtataatcaaaatgcttgagaggatcatataatgtagggttattagggatggcgcagataaaggccatttctcccaaagtgagagatttcagcggcttgctgaaataaaattgtgccgccgaaccgacaccgtatacgccgttattaaaataaatcgtatttaagtagccttctaaaatctcatctttgctgtatcttttctcaagctgataggaataggccagctccgtcagttttcggctgaaggtgcgttcatggcttaaatacacattccttgccagctgctgggtgatggtgctggcgccctgatcaattttatgatctttgaaattggaggcggccgccctgaccatccccataaagtcaaaccctttatgctcataaaaatgacggtcttcagaggttaaaaacagttgttttacctcattcggtattttattaaagggcacgatcacgcggttctcatgatcgctgacaatctcagaaacaaggcttccgtccctgtcatacatgtaactgttttgaaccaggttgatcgcttttaaatcaatatgtttatcgagcacctgatcaaaaggcttgatttgttttacctctttgccggaagcaataactgtaaatgcacacaacgggataatgccgagcagcaaaatccatccgattattttacgtaccatggtcactctcttttctcctgatttctagccatatcgtatcattcttttaagaatacgagaaggttaaatttagaagaaatcgtgatcgctgccggtcagcccgcatttgacgctgtatccttttgcagatgtcccgccatccataagagccccgcgcctattaaaaagagaaaggcggtgacgtagaaagcagccgaaatggaaaaaccgcttgagaccgcacctccgagcagagggccgagcacatttccgagaaaacgaaagctgacgttatagccgagcacctctccctggatgctgcccggcgccctgacgcggattgcggccgtaatgcaggggagcgtgccgcccatgaccatgccgaacagaaatctgaagactaacagaatggagagggaggaggcgagcgcctgcggaatgaaaaacaccgctgaggcaatcaaaagcacgattaagatccggctgtggccgaagcggtcgccgaagtccccccatttccgggcaagcagtaagcttccgagtccggtcgctgaaaacgccattccggagaaaaaagctaaattaacaggtccgtgcagctcattgacatataaagcgagcagcggctgaatgctgaaattgccggtctgcacgatcatagtaagcaccatcatcgcccaaagcgcgggctggtgaaaaatataagagagcacctgttttctggaataggttttccgtttgttttgtttctcgccgagcggctgctcattgacctgaaataaaacgagaagcacggacgcgaaaatgacaaaagacgtaataaaaaatgtgtacgtaaacccgaagctgtcagcgagcagcccgcccagcatcggtccgaataaagtgcctgacacctgacccatctgcagcgtgccgagcgtcttcccggcagtctctttcggcgtctgcgccgaaatcatggcaagcgatgtcggaacaaagcctgttactagacccataagcagccgcaggacaaacagctgataaacggatgtcacaaaccccatcaataaaatgctgacggcaatgccggttcctgtaatcaagagaatttttttgtagccgcgcttatcgccgaatcttccccaaaacggggaaatcacaaacgccattaaaaacgtgacgccgaacacatacccgctccatctctgcacatacccgcccgaatgggggctgatcgtttcgatatataacgaaagaaacggaacaatcatggtcatgctggcggaaataaagaaatttgtaatccaaatgacgacgaagttcttcttacggacagaaataacatcaccttctttacttttcgtgtatctaatcattagtatataggaatgaatccggtatttgtattttcgatgcggatataggaaaattcattatttttagaaaatgaagaaagtttcagaggggaaattgatatactatcataaaatatcatttttgatcggaggaaaggcaggtgtaaaaaaagtggatcagcgcagtctgctcattattgattttgaatttacaatgcctgacggaaaatacagcccgcaaaatttctttcccgagattattgaagcggggattgtcaagacagtgaatgatgaagtgactgaaacgttttcgagttatatcaaaccgaaaaaatttccgaagctgacgaaacgatgcaaaacctttctgaacatcacccaaaaagacgtggacggcggaatcacgtttaatgaattcatccgcaaattaaatgagcttgatcctgataaaaactgcacgatcgtcacctggggcaatatggatatgaaagtgttaaagcaaaattgcatgtttaaccacatcccttttccgttcaaaggagaacttcgggatctgtcccttgaatacaaaaatttcttcggcgacagaacattgaccggcctttggaaagcggcagaagagtatggcgataaagggacgggcacgcatcataaagcgctggatgatgcgcggacgacatacaaattattcaagcttgtcgagcgggataaacaatatcttgaaaaaccgaaacctccgacgatcggtgatcgcgtcgatctgactgaactgtttcgccgggccacataaaaaaacccaatcatgccgactgggtcaagttcttttaaaatagtcacgctctaacgcggccaagttgtcgagcgaacgttccgcccattctgagccgtccgctgtaagctgatctttcagccgggcagacgccgcttgtaaggaagccgtataatcaggcacctcgccatcaaacggtttgaccatctgatgcggtatgtttgtctgttccccgaatgcaagcgctcttctttcatgaaaaaacggaacatccgcctgcttcggatgatgaagatctccttgagcgggatgcgtcagaacggctttaattttcactaaatagtgattgggcctgacgtctgtcacttcccctatgtatgctcctgttttataaaacccttttacgattgtgccgatgtcaaacgtattcatagcgttcacctctctctagttattctataaaagatcaacgcggttggctagtgaacagctgccggaagcctgactgaggccgttgtgcccgagtgctcgccgctggtgaaacagacggagccttcatgatgctgaataatcgagaatgtcacggtaagcccgagcccggtgccgttcgttttcagcgtataatatggcttgccgagtttctgcagttcttcatcggacatgccgattccgttatccgtaatctgaatgagaatcatctcttcctgtttttggacggagacctcgattcggccgttttcagagggcacggcttcaatactgtttttaatcagattaatgaaggcctgtttcagtttttttacatcgccgaacacatataaatcaggctcgcttcgaaccgtaacggtcaccgatttaaaattggcataagactccattaaggaacctgtttcctttacgagcagagaaatatcaaacttttctttttcatagtcatcctgcttcgccatatcgagataattcgtaatgatcgtctgagcccggtcgagttcggacagcacaagtttctgatatccggagtgggatttgtcctgaagctgctcgccgctgaacagcagctgcacaaaacctctgacgaccgtaagcggattgcggacttcatgggcgacgcttgccgcaagctcgctgacgacggccattttttctgagtgaatcagccttgcccgcatggacgcattctcatcaatgatctcaatcaaataaatgcacagcaaaagggcgctgacttgaaaaaaaacagatactgccgcctcataataaacggaagatagattttgaaaattgaaaatattggtcgcggaatagatgaagacagatgcggttaataaggcggtttcagtgcagccgatgagaagagcgaaaagcagtttcttccgctttgaaaaaaaaggccatttcgtttggagctggatagggatgatgattaaaaaaggaattaaggataagaaaaaaagagcggaaggttcaaaccatatgagctgaaaaaaaacggatgccgcccctgcggcaagtcctgcggcggtaccggaataaagcaggcagacgataatgggaatcagctgcaaaccgtaacggacggaatgaagctcctggatgggaaaagccgtacataataaggaagatgacgctgcaaatacggcgaccagcaggcggttcgctctcggtacaagcaaatcgggcttgctgagccagaagacttgataaagaaaaatagggaataaaataaaagagaagtgaagcaggtaatcctttacaatctccatttatgcgaaatcctttcctatgtaaatatgaatctattataacatctttaccggaaaaaaaagtatatatttctctaaagcgaacgcccttatctcatctgataaaggcgttctttccgctgctaagcgagcgctgctttcattctctcaagcccttcttttacggcggcggctgaacagccgacattaagtctcataaatccttcgccgcccggtccgtattttgttcccggctctaatatgattttcccttttttgagcattctttctttgagctcggcatccgaaaatccgtattcgctgaaatccatccagatcaaataggaagcgtcaggcttcatcatgcggactttcggcaattcttttcttaaaaagtcctcagccaatttcatattcccttcaatgtaaggaatcagcgcgtcaagccaagggcctccctttgtataggccgcttcgattgctgcaaccgcaaatgtgttgaggctggaaatcccgttctgatgcaatgcggcggagaatttcgcccgcttataccgatcgggaatgataatggcggatgcctgaatcccggcaatattaaacgtcttgctcggcgcgacacaagtaacggaaatccgcgcaaactcctcagacagagaagcgaaaggcgtatgcggctttccgtacagcatcaagtcggaatgtatctcgtcagaaacgacggtgacgttatgggcggcgcacagcgatccgagcttcataagctcatcccggctccacgctctgccggacggattgtggggattacaaagaatcatcagcttgacctcagaatcgttcagctttttctcaagatcctcaaaatccatacagtagacgccgttttcttcccgtaacgggttatgtaaaacctgccgtttgttttccttgatcatctgataaaaaggcgtatacaccggtgattgaatcaacaccggatcgcccggttcggtaaaggcttgtacggccatgctgattgccgtgacaacaccgggactgaacgcgatgtttgcgggatcgggccggtagccgtgccgcgtctcaagccatgaagcgacggcttctcttgtgttttcgtcaggagacgtgtaaccgaatatgccgtggtcaaggcgggcttttaaggcgtcagtgaccgcttcgggagcgcggaaatccatatcggcaacccacatcggaagcgcatccgatacgccgaataacgcttccgccttgtcccatttcaccgattgtgtgccaagacggttttctcgaagatcaaagttcatgtatgtcactcctgtagtatcattattttgcacagcgtatctatgataaaatagaattgcaaactttattataagcggtgatgaaaatggaagaaagccaagcggtcatggaaatgatgaaaatcattgccaagtgggacccgtttaaatatggagaagatttttatgagacagaagccgtcgacatcgttcaggccgtctacagtgaagaccgtgccgacaagctggcagcagccattcaggatatctttgaagcttcatttgagcaaaagcttccgatcgaaggatgccaaaaggccgctgagcagcttctgttcataaaagaaagcagctcctgcaccccttaaaaaccggcggttccgccggtttttttattgaataaattcaaaaatccgctccgaaacaaactccgggcgctcttcaggtacgaggtgccccgtatccttgagtgaatacagaatggaatccggcaggtcgtcatgaagccgttttccgactgagaccggaacgacacggtcttcttctccccagattaaaagagcggggttttgcactttcttcaaatcctcgggctctaaatcgccctccctgtgtctgataaaccttgtcatcgctttgaaaatctggcggtctgtaaatggtttttcgtaaccgtcaatcatttcctgatcgataagcgtccggtcgtgaacgacatttaacaggttgttcagcacgccgtcttttgaaagccaatacttaagatacaggtcaaaacaagggagatgcgtcccgaatataatcgacgggtgcgagcgctttaaataccccgagctgcacagcaggacgattttagaaaaaagctcgggtctgagaagagacgcggataaggaaatctggccgcccattgaatggccgatgagtgcggcccggctgataccgagcttttccagaagtccgatcagaagcttggcgaggtttgcgtaagtatatacgaaagtccgtgacttttccgattgcccgaaaggaggcaggtcaacggcgataatatcataatggtttctgagcagcgggatcagttttctgaagctgaatgccgaagataaaaaaccgtgtacgcagacgagtgtctgtctgccgggattttcataatgctcgtaatacagctcaactccgtctatcgcggcccgtttaatcggtgaaacagcttccatgagagccttcgccgtcctttctttgttgtaatgtaaaggcttttttgattgtcagattttagctctggtttctttcgggtttttcttagcatttgtcgaaaatcgtgatataatgtcatgaagatttttgataatgcaaaggtgtgaaacgtatgaagctgaccgaaaaagaaacagaaatattagaaattttagacgaaaacagccgcgttgatgcggaaacgattgcgaaaatggcaaacattcccgctgaagaagtcaaaagcatcattgaaaagcttgaaaaggaaaaagtcatcattgattatgcggcgatgatcgactggcgcaaagtcgacggtttggaaggcgtcacggcgatgattgacgtaaaagtcactccgaaacgaaatgtcggctttgatgaagtcgctgagcggatatacagattccaggaagttgaatcagtgtacctgatgtcaggggtgtatgacttatctgtcgttattcgcggcaacacgatgtcagatgtggcaagcttcgtgtctgaaaaattgtccacccttgagtctgtcgtttccacgacaacgcacttcatcctgaaaaaatataagcatgacggcaaagtctttgaaagcggagacgatgacaaaagaatcgtggtgtctccgtaaatggaaacgaagacttcttatttatctgactacgtgcagcagattaaaccgtcaggcatccgcaaattctttgatctggccgctacgatggaaggcgtcatttcactgggagtgggagagcctgactttgtgacggcctggaacgtgagggaagcgagtattctttctttagaacagggttatacggcttatacggcaaatgcgggtctttatgaactgagagaagaaatcagccgctatttagatcagcggttcagcctgagttattcgcctgacagtgaactgatcgttactgtaggggcaagccaggcgcttgatctcgctgtccgcgccattatgaatcctggagaggaaatgttaattcccgaaccgtgttttgtcgcatatgaatcactcgtgacgctgacgggggcgaagccggtgccgattcagactgtcgctgcaaaaggtttcaaagcatcagcagccgattttgaagcggccctgacggacaaaacaaaagcgctgcttctatgctcgccgtcaaatccgacaggttccgtctattcgaaagaagagcttgaatccatcgctgctttcgctgaaaaacacgacttgatcgtgcttgccgatgaaatttatgccgaactgacgtatgacgagccattcacgagcatgggggccatcagcggcatgaaggaacgcacgattcttatttccggcttctccaaagcatttgccatgacggggtggagactcggatttacggcggcgcctcccgtgatcagggatgccatgctcaaaattcatcagcacgcgatgatgtgcgcgccttccatggctcagtatgcggcgcttgaagggctgaaaaacggtcaggaagacgtcgaaagaatgaagaaaagctaccggagacgccgaaacctgatcgtggagacattgaacgaaatcggactcggctgccaccaccccggcggagcattttacgcctttccttccattcagtcgaccggcatgagttcagaagaattcgcggaacagctgctcattgaagaaaaagtagccgtcgttccggggaatgtattcggcccgagcggcgaaggctacatcagatgttcctatgcgacatccattgagcagattcaggaagcgctcgtcagaatcaaacggtttgttgaaaaaagggcataaaaaaagatacgaacccggttcgcatccaaataaaaggggggaatactagaaagccttcgtaatcatagtataccctcctttatctgtgcttaaacatgattatgtaaaaaagttctctttgcgaaaaacaaacttgtatgatataattttaaattgcgtataatctgtatttaatttaacttaggagttgttatgaatggcagcaaaatttgaagtgggcagtgtttacactggtaaagtaacaggattacaagcgtatggtgcgtttgttgcattagatgaagaaactcaaggacttgttcacatttctgaagtcactcacggtttcgtaaaagacattaatgagcacctttctatcggtgacgaagtacaagtaaaagtacttgcggttgacgaagaaaaaggaaaaatcagcctttctatccgtgcgactcaagcggcgcctgaaagaaaagaaagcaaaccaagaaaaccgaaagcggctcaagcttctgaagaaacatctgctccgcaaggtttcaacacattgaaagataagcttgaagagtggattgaacagtccaaccgcaaagaccttatcaaaaaataatcattaaaaaaagcaccggatatgtatgttcggtgctttttttatgtttatctgacttccggatttgccgcttcctcgcgggatgtttcttcgttcggcttaaacagcaggccgagattgatcagaccggcgatgccgacaaggccgtaaataatccgcgacagagctgatccttggccgccgaagatggctgctactaaatcaaattggaaaaacccgatcagtccccagttaatagcgccgataatcgttaatacgagacagatacgctgaataacactcatgtaaacaacctcctctatgaattcgtgaaacagttatagattgtgacaaagcaaagaatctatgcatactacattctccgccgtgtaaatcacacactgtttcaagctgtacaagtgcctttcccgggaattcgatgtctgtaaaccatgtgatgcgccgtcaaaaaagcggattgctttacattgaacgtcatctttctgcataatataaatccaaaggaggagatgtcatgcaaaactttacatattggaatccgaccaagttgattttcggaaagggagaggttgaaaaacttcctgaagaaatcaaaccgtacggaaaaaacgtgctgctcgtatacggaggaggcagcattaagcgcagcggtctttatgatcaagtaaccgaactgctgaaaaaagcgggagttaccgtacatgaattggcaggcgtagagccgaatccgcgtgtctcaacggtgaacaaaggtgttgcgctctgtaaagaaaacagcatcgatttcttattggccgtcggcggcggaagtgtcattgactgcacgaaagccatcgcggcgggcgctaaatatgacggcgacgcgtgggatatcgtcacgaaaaaacaccagccgaaagaagcgctgcctttcggaacagtgctgacacttgcggcaaccggttcagagatgaactccggatcagtcatcacaaactgggagacacaagagaaatatggatgggggagcccgctcgtttaccctaaattctctattctcgatccggtaaacacatttaccgttccgaaagaccacaccatttacggcatggtcgatatgatgagccatgtgtttgaacaatatttccaccacacgtcaaacacgccgtatcaggaccggatgtgtgaatcgcttctgcgcacggtgattgaaacagcgccgaagctgatcaatgatctggagaactacgagcttcgtgagacgattttatatacaggcacgatcgcattaaacggaatgctgtcaatgggcgcaagaggggattgggccacacacaacatcgagcatgcggtatcagcggtttacgatataccgcacgccggaggtttagcgattctgttcccgaactggatgagacatgtgctcaaagaaaatccggcccgctttaaacagcttgccgtccgtgtcttcgatattgacgagacaggcaaatcagatgaagagatcgcacttgaaggaatcagcaggctgtctgatttctggacgagcctgggcgctccgaacagactcgctgattatgatatttctgatgagaagctggatacgattgcagataaagcgatggcaaacggagcattcggacagttcaagtcactgcagaaagaagacgtgcttgcgatactgaaagcatcattgtaataacataaagggggcggccggattggcagctcctttttttctgtgttatagtaattcccttacgatttttttggaggttatgataaatggagaactttacgtactacaatccgacgaaactgattttcggaaaaggtcaaatcgaccaattgaaaaaagagctgaagcaatacgggaaaaacgtgctgcttgtatacggaggcggcagcattaagcgtaacggcctgtatgaccaagtaacaggcatcttaaaagaagaaggcgcaaccgttcatgagcttgcgggcgttgaaccgaacccgcgtctggaaacggtaaataaaggaattgagctgtgcagaaagcatgagattgatttccttctcgcagtcggcggcggaagtgtcatcgactgtacaaaagcgattgcggccggtgcgaaatatgacggcgacgcatgggacatttacagcaaaaaagtaacggcgcaggacgcgctcccgttcggcacggtgctgacgcttgcggcgacaggctctgaaatgaaccctgattccgttatcacaaattgggaaacaaacgaaaaattcgtatggggcagcaatgtcactcatccgcgtttctccattttagatcctgagaatactttcagcgttccggaaaaccaaaccgtatacggcatggtggatatgatgagccacgtatttgaacaatacttccacaatgttgaaaacacgccgcttcaggacagaatgtgttttgcggtccttcagacggtaattgaaacagcgccgaaacttttggaagaccttgagaactataagcaccgtgaaacgattttatacgcgggtacgatcgcattaaacggcacgctgcaaatgggctatttcggcgattgggcttcccatacgatggagcacgccgtatcagcggtttatgacatccctcacgcgggaggacttgcgattctgttcccgaactggatgagatacacgctggatacaaatgtagaccgttttaaaaacctgatgctcaacatgtttgacattgatactgaaggcaaaacggataaagaaattgcgcttgaagggatcgataaattgtccgcgttctggacaagcctcggcgcaccgtcccgccttgcggattatgacatcggtgaagacaaacttgagctgatcgcagacatcgccgcaaaagaaatggaatacggcggattcggcaatttccaaaaactgaacaaagatgacgtacttgctatcttaaaggcgtcactgtaagatacatttccggccggggtgaagatgaaatagattttcaagctgcagatgtaaccgttttgggagtcccttcattagtgcatcaagagcaagtgaaacaccccttgccatgagacaactatggaaatctcacatgatgcggatttgactccctgtttctgtacatttagcagaaaaggatcaattaactttgcgattgccgatcatctatttacacaaaatctaaatcatgaagagccgcgaatttaaaaaaggagcgctgattcaatcagcgctccttttatgcattttgtgtactaagatcccgctgcgcccccatatagcttcccattaagttttgataaccgggaagatgactggagattaatgcgccaaaaccttcaacatcgttgcgccaatcacgctgtaactcgcatgctacgctgaaccagttcataagctgcgcgccgccatgagccatacgcgttaatgatgcatctgctacttgcttattaaacgtccccgaagcatctgtcacaacaaacacttcgtagcctgctttaatggcagaaagcgcaggaaaagcaacgcagacgtctgttaccacccccgcgataatcagctgttttttgccagtcgcctcaatggctttaacaaagtcttcattgtcccatgcattaatttgtccgggacgggctatttttggcgcatcgggaaagagatcaacgagttcttgcatgagcggtccgttgggtccattttcaaaactcgttgttaaaataaccggtaaatcaaagaatttagccgtatcaccgagagccaatacattgttcttaaattcatcaacgctatagtcacgcacgagaccggaaataaggccggtttgatggtcaactaaaagcacggcagcatcatcttttgaaagacgggaataaagatcagacattttatcatcctccttgaattaaggcaagtaagtttgtcaattgaaaacggtaaatctattcatatgctgtatagaaagaaagttatttctgaggtgacttttcgtgagggggatgatccttcaattaatttggaacgggaaccggagcatgatcaatccaatggataaactgttgtaaatagcgttgaagataacgttttgtttgttcatccgtcagtatgttttgagcggaatcaattttctcatggacttgcgaaatcagcattttttgaaagggcaaaacattgacttgcatagcttcgagtacttccctcatttgcgtttgaccaaaggcagtaccgaaccctccgggggttgctccaattaagccaaccggttttctgtttaaaacagaaggggtccgcggtctcgatgcccagtccaatgcattttttaatacccccggaattccgaaattgtactctggacttacaatgatgacgccgtcaacgtcttgtatatcagctctaaaggatgttacggagtctggtgctccggcaatttctaaatcttcgttaaaaaaaggaagactgtctatttcaacccaacgaaattgagccgcattatcgaaagtcaatcaatgattgagcaattgctcgattatacgagttttttcgtaaacttccacaaataagaccaatggttttagtcataaaatcacctcccggtttaaaatcactttcatcttaacacgataccccaaatatagacactatttttaaaaatggacatttatgccttaatattccttcgtggcagcctctcaagaggagtactatataaaaagaaccggcccatcgggattggcgatggatgtcatcctgctccaaagtaaaggtgatacgttcctggatcaccaacattcgattcgttatccctctcacgattattacaaatataaccatatcgaatccggggtattgtataaaaaatgaatgcatttttagcgcaaatcccatattcatcatgccttcttcatgacttgatttagcgggtgagttcatataaagtgaaagagaaaacaattcaccgtgatggagggataagcaaatgacgcatgtacgctttgattactcaagagcgttaccttttttcaatgaacatgaacttacatacgcacgtgatttcgtaaaaacggcacaccataatatccatgaaaaaacaggcgccggaagcgactttttaggatgggtggacctccctgaaaactacgataaagaagaattcgcgcgcattaaaaaaagcgctgaaaaaatcaaatcagattcagacgtgcttctcgtcgtgggtatcggcggttcatacttaggcgcccgcgcggcgattgaagcgctcaatcattctttctataacgttctgccgaaagacaagcgcaaaaaccctcaagttatctttatcggcaacaatatcagctcaacttatatgaaagatgttatggatcttttggaagacgctgatttctctatcaatgtcatttctaaatcaggcacgacgacggaacctgcaatcgctttccggattttccgcaaacttcttgaagaaaaatacggaaaagaagaagcgaaagcgcggatttacgcgacgacagataaagagcgcggcgctttaaaaacgctttctaatgaagaaggcttcgaatcattcgttattcctgatgatgtcggcggacgtttctccgttctgactgcggtaggtcttctgccgattgcggtaagcggggctgatatcgatgaaatgatgaaaggcgctcttgatgcaagcaaagacttttccagctcggaattagaagagaacgcggcttaccaatacgccgtcgtccgcaacgttctgtataataaaggcagaaccattgaaatgcttatcaactatgagcctgcgctgcaatactttgcggaatggtggaagcagctcttcggcgaaagtgaaggaaaagatgaaaaaggcatctatccttcttccgctaacttctcaacagaccttcactctctcggtcaatacgtgcaggaaggcagacgcgatctgtttgaaactgtattaaacgttgaaaaaccgaagcatgagctgacaattgaagaagcggaaaatgatctcgacggcttaaattacttagccggcaaaacggtcgatttcgtcaacaaaaaagcgttcgaaggcacgatgcttgcccatacagacggaaaagtgccgaacttaattgtcaatattccggagcttaatgcatatacatttggatatctcgtctatttctttgaaaaagcggtggcgatgagcggttatctgctcggagtcaacccgtttgatcagcctggtgttgaagcctataaggtgaatatgttcgcgcttctcggcaaaccgggctttgaagagaaaaaagcagagcttgaaaaacgccttgaaaaataaaaagaaaggctggccctcagcatgacgggtcagccttttttaaaccgtgaaaggtgtgatgatgaatgatacgactcttatgtaagcatgccgtcatttccgtctgttccgccgctattgtctattcggcactaaaactgtctcctgaatccctcttacaaaccatcctgtttttcgctttccctctcggcttgtttacggacatggtccggctgaaactgaagattggccggatgcagtcgctgatcacgaagtgctgtctctatgccgccgttttctatatttcaacggaagccgttctctccgcaattgtgacgtatgttctgattgaatgcgccgttacctctttccagcgtctgtctgccgctcccgattcttcccgggcgccgtatgaagatgccgcagagcggggacgctaaagacaaaaaggagcatatgcacatgatcagcattccatcttcacttgaagggcaatcgtttttactccgcgaactggaacaggtgctgaaaccgatcggttataccatcggaggcggctgggagtatgaccgcgggttctttgattacaaaatttccgatcaggacggctatttatttctccgcatccctgttgaagcaaataagggacacctggatgaacggggggccgccgttacaatcggcaccccctttttgctgaggcacgtctatcaggaggaaacggatgatcacgcaggcggcggtgtttttgagtcattattcaaccaattctccgagccgaaacggcgggatgcggcaattgaccgctcatatacagatatcgggatctcgcttgtaaaagagctggaagacgtcctgctgcattaaagagccaaaaacagatcagtatcgagcacctggtatgacaggggaggggtcagcatcggcccctcttctttttgtatgccgatgatcgtggtattccgtttgagataatagagcgcacagtcatgataagatgaaccctttaaatcctcggggacgggaatgatgcgcacctttttctccagcgtcagatctgacagcgtttgcggtttggcaagctgcagcttgacccggtaatgctcaaacatcacccggctcgacaggcgtgatgtgcacagaatcttattggctcctgcgcgctcggcgtttttgacataccgttccgttaaaatttccacgatacaataaacggacggatgcagccctttgatggcgagaagcgttaataccgacagcatatcagcttcggattcatttttctgctggtctgctgtcaaaatgacggtatcggcttccgtaatattcgccttattgagcgtactgtcatcagcggcatgtccgcggatgaaatggacgttttcaataagcggcccttcccttaatgaatcatcaatcaggacgacagtttttgacggcgcgatgtgctgcagttctttcagcagcatatgcgacttctcattccatccgataagaatgacgtgccccttgcctttaaaggcgaccttcccttcgacatagcgatgctgtttgctgaacacggctgaagaaagcgtggcgaaataggcggttacaaaactcgctccgcttaatacaagcaccatgccggcaatctgcccgagcggcgtctggggcacgtaatcgccgtagccgactgtggccaccgtaataaccgcccaccaaaccccttcaaacacagacgtgaattgcttcggctcaagcatgtaaatgagttggccgaacaataaaatcaaggcgataatgatcagtccgatccgaacatataacggccatctcagccaggaaataaataaacggtttgatttcattcgcccggctcttctttcgacagagagatggataaaatctgcttaataatggtgtttagtttttcgttcagctgttgctggccgtatgagtcacgcgcatgtctgattaaatcggccgtctcatcttcaaactgaatgagaggttcgtcgttttccgattcattatagagctggataaaggcgtcaagcccctcgttcattctgtctatcgcattgctcagctgttctttctcgccatttgtcactttcatgtcgatcacacctgtatcttttttatacagtatgtcccagttcgtttgatgtctttcaaaaatcgccgaaaacatattcaccctcattttttcatatgataaagaaagcggaccgaaaaagggtgagtcaaatgacagtcattcaaaaactgctggcggcgctggccggagcgcagctgctcgcttcggcggccgtattgcttattttcgatttgaatggatacaatcatatgtccggcggattttcatggcttgtttttgcaaaagagaccgcaggcacgtttccgttttacatcggattggccgggtgtatcctcatcatgctcggaggattgattcctgtcagaaaaaagaagcggatttctgtacaggaaagcggacaatcattaaaataatatataagcagatcgtacgatataagagaaaaaggaagaggataatatgctgtttatctttttaacaattgctgcattgggattgtcgttttgggcacaatttaaagtgaaaagcaattttcagaaatactcagacgtagaagcttccagtcagcggacgggggcggaaacggcaagacggattcttgatattaacggtttatatgatgtgccggtagaaccggtaagaggcactttaacagaccattacgacccgacggagcgggtggtgcgtttatctgagccggtatattacggccgctccatttccgccatttccgtcgcttcccatgaagtcggacatgctttgcagcatcaggaatcatacggcgcgcttgtgctgaggcacaaaatttttccggtcgtcaattttgcctccggggttgcccctctgcttttcttgggcgggatgctcctgggcagcttgaacttaatcggactcggcattattttgttttcggccgctgtttttttccagcttgtcacactgcctgtcgagtttaatgccagcgcgagggcgaagcggattatcgtgtcggaaggattcattcgcaacagtgaagaacacggcgtgaataaagtgctgaacgccgccgcgctgacgtatgtggctgcggcgctcgtttcattattcgagctgcttcgttttgtgatgattttcttaaatggtcgtgatgagaattaacacgaaggaggtggccccttaccgtttgcggtaggggtttttttgcttatattaaaactgattctcattatgctgttaatcggattaacggccatctttgtcgctgcggaatttgcgattgtcaaaatccgcggttcaaaaattgcggagctggttgaaaccggagacagccgggcgctcgcggcgcacagggtgatttcaaatctcgatgaatatttatcagcgtgccagctcggcattacgattacggcgctcggactcggctggctcggtgaaccgacgattcagcggcttcttcatcctgttttcagcctgatcggaatgccgtcatccattacgcacgtcgtcacgtttattgcggcgtttatcgccgtcacgtatctgcacgttgttatcggagagcttgcgccgaaaacgatatccattcaaaaagccgaagccgtcagtctgtggacggcgaaaccgctcattctgttttataaagtgatgtatccgtttattaagctgttaaacggttcagccggatttttggtcaagctgttcggttttcattcggtgaaagaacatgaggtcgtggtcagtgaagaagaattgcggctgattttgtctgaaagctataaaaaaggtcaaatcaatcaatctgaattccgttacgtcaataaaatatttgaattcgataaccgggtcgccagagaaatcatggtgccgcgcaccgaaatcgccgtcatctcgcttgaacagtcagttgatgaagccatacatttgatcatcaacgaacggtatacgcgatatccggttattaaggaagacaaagatcacattctcggcattattaacaataaggatttatttaaggcgtattttctcggccgctccattgaattaaaagaaattatgcgtccggtcatcagagtcattgaaagcatccccgttcaggagcttttgatccgcatgcagaaggagcggattcatatggcgattctcgttgacgaatacggcggcacggcgggacttgtgaccgtcgaagacatattggaggaaatcgtcggggaaatccgtgatgaatatgaccaggatgaaatgccccacatcgtcaaaaaaggcgaacaccactatgtgatggacggcaaggcgctcatagaagaggtgaatgatctccttgatatcgccatcgaaaatgaagacattgacacgattgccggctggctcttaacacaaaaaatggagctgaaaaatggtgatgtgtttcatgccgaagggtgtgaatttaaggtgctggaagcggaagaccatcatatccgcttcgttgaaattaaaaaaactgatttctgagcctcctgcttttgcaatgaggctttttttatggaaaaaatgcttcttcgtcccgctccttcatatgctgtaaagaaaggagtgtcggtatgaaaacggattggtggaaaacggcggccgtctatcaaatttatccccgaagctttatggattcgaacggggacggaatcggcgacatgaacggcatcagagcaaaacttcgttacataaaagagttgggggcggatgtgatctggctttgtcccgtttttgactcgccgggcgcggacaacggctacgatattcggaattataaacaaattgccggcgaattcgggacgatggaggattttgaccggctccttgcggatgtccatgcgctcggcatgaagctgattatagacctcgtcatcaaccatacaagcgatgagcacccttggtttatcgaatcacgctcggcgaaagattccgaaaaacgggactggtacatctggagagacggaaaaaacggcaaagagccgaacaattgggaaagcattttcggcggatcagcgtgggaatatgatcaagagaccggccagtattacctgcacctgtttgacaaaaaacagcctgatttaaattgggaaaacgaagcgatgaggcagtccgtttatgagatggtccgctggtggcttgataaaggcatagacggcttccgggtggatgccatttctcacattaagaaaaaagaagggctccctgacatgccgaacccggacggtctcccgtacgtcccgtctttcccgtatcatatgaatggggaaggcataatggatctcttaagagagctgaaacgggaaacattttcgcgctatccgatcatgacggtcggcgaggcgaacggagtggcggcttgggaggcggctgattgggccggtgaagaacacggcgtctttcaaatgatttttcaatttgaacatctcggcctctgggatacggaagatgatcaaagcatctccattccggcgcttaagcgcgtcttgtctggctggcagaacagtcttgaaggaaagggctggaacgcgttatttatggagaaccacgatcagccccgttccgtctcggtatggggtgacgaacgttttttgacagaaagcgccaaggcactcgccgcgatgtatatgctgatgaaaggcacgccgtttatttaccaggggcaggagctcgggatgaccaatgtttcgtttccatccattgaagattatgatgacgccgcaatgaaatatctgtatgaaaaagagacgtcccgcggcgttccgcatgaaaaagtgatgaagatcatctggaagaagggccgggataattcacggacaccgatgcaatggagcggtgaggcgaacggcgggttttctgatgcttctccgtggctcggagtgaatccgaaccacacatggctgaacgctgcatcacaaatgcaggatgaaacatccgtataccatttctacagacggctgctcgccctcagaaaagaacacagcgtattgatcagcggcacatatgaattgctgcttccgaatgaccggcagatttatgcctatctaagaaaaaacggaacaaaaaccgccctgatcatcacaaatctgtctaaaacccccgctttatacaagcatcccggctatccgcttgactccgatacgctcgtgctcgcaagcatggaaacaccaccgcatcggcatgtgacatcctttcttttaaagccttatgaggcccgcgtatatatatggtgaaaaacttcagtcccgaggctgaagttttttgtgatctgcgtttatcatcgcgatccgacaggaaaagacaaatacagaaacgaatatgggaaaggaagagaaaaagaaaggaggcatctatatgctgaaaaaattgcagattcaaacaaacagacgggatgaaatgatcgacatcacacatgaagctgaagcgtttctccgcaaaacaggcgtgaaaaacggcttggcgctcatatactgtccccatacaaccgccggcattaccataaatgaaaatgccgatccggatgtgaagagggatatgctcagaaggtttgatgaaatgtatccgtgggagcacgaactggaccggcatatggagggaaatacggcggcgcatatgaaagcgagtacaaccggcgcctcccagcatgtcatcatagaagacgggcgcctgatactcggaacatggcagggcgtttatttttgcgaatttgacggtccgcgaaacagaacatgttatatcaaaatacaggctgaatcggaggaaaacacaaatgagtgagtggatgagtgcattatcattaacaaagcccgtcattcaggcaccgatggccggcgggctggtcacgccgcgtctggcttcggcggtatcaaatgaaggggcgctcggaagcctcgcttcaggatacgtcagcccgcaagcgcttgaaaaacagcttatcgagatgaaagagctgacgaaccgctcctatcaagtaaatcttttcgttccggaagaaaggcagatgcctgaggcggaactggttgaaaaatggaaagcccgcatcccgagggcaaaagacgccaagccgttctctgatctgaaagaagaatggaatgatttcgaggaaaaagcggagcttctgatccgttacggagtcaaagcgtgttcattcaccttcggcctgccgccggaagaaacggcggaaaagctgaagaaaagcggatgtttccttttcggcacggcgacaacgccggaggaagcgaaggtctttgaagaacgggggatggacgccgttatccttcagggaatagaagccggcgggcatcgcgggtcgtttctgccggttaaaggagaaccggctctcggccttatggcgctgattccgcaggctaaagacgcgctgaatatcccggtgattgcggcaggcggcatttttgaccgccgcggcgtgcaggccgcccgctgtttgggtgcggacggcgttcaagtaggaacaccgtttctcctttgtgaagaaagcagcgcctcaccgggatatcaaaaagccattgccgattcaaaaggagccgacacgcggctgaccaccctgttttcgggaaaacaggcgcggggaatcgtgaatcagttcatgaaaacatatgaggctgacgagggaaatacgctgccttatccgctgcataatacgctgacaaagccgatgcgcgggcacgcggctcaatcaggagacgcggagtatatgtctttatgggccggccagtccgccgcgaaacttgaagggccgacagacgtgaaaaccgttttggaagaattgtgcgaatcataatccagaaatcgtgaggtgatggatgatgaagattcttcaaatgtcctataaaaaaagagggactattgagtttgtctttgaagattttccgcattctaaagtcaccatggcgccgattaaagggtattactttgtccgcgccattaaatggagccgacgggacagagccgtcacccgacatgatttagagaagtttgaatgggctgcaaaccaagcgctcggcacgacggctttttaccggaaaagaaaagcattccgcatcccatcgtcacaatgacagacgatgggattgttttaatgcatgatctgataaagcgcgggtgcatcaagccttgttgcctggttaagcagataagccggctgcacggcatttttttttcttaaagaattcaatctctggatgatttgttcagcggtcagaatcccgagaccgtgggcgaaatattgatcattccccatcacaatgacattctctccccgccactgagcctttgcaggattaaaatcaggatttttaaaatataaacaatctccccgtaaaaagtggctgccggtttccgtgtagatcggcagatgctcatagtgccagtcatacaaagtgatatcccggaaacgccggttaaaccgttcttcaccgattgtctttaagacggccagataataaatcacaacaatggcggtagcgcattcaaatgcgtaaaacgccccgttttcaataatgtcccgaatcgcttttgaagcggggattctgtacttcagctccaaggctccttccggcgtcactctccaataagccgtatttccgtatgttttggcgaaagttgcaaatttcacacctgatccgtgcagttctcttgcggcttccacaatatggcggcgcagccgcacctcgaacatcagttcagcaatcgacccgtaatcgaattgtacgggagaattgagcagttcatttatatacggaacaaggcttttttccgtctgccagttcgcgatgtcctgaggccgaagcacttggccggatatgataatcatctgcgcgccccctatctttttttataagatatgcaggaagcttgggcaatgaaaatcaagtcataaaaaaggaggaaatgttaacaaaatgtgaagactgagccgatatataaggtatcacacttgagggagcagcttaatatgaaaaaattcattaattggtgcacaaaggcatcgatttcacgtaaattaatcatttcatttatcgtgatcttaatcataccgattctcgtgttagaattcagttcataccatacggcgagcaattcgctggatgatcagatttcaggcaacgcgaaaaataacatcgaatcttttaacacaaccattacaaatgatatcggctcaaaagcaaaggcgattgaatttttcagtgaaacgttaaaaggatcatccttctcaaagaaaaacatgtctgctcttgaagaaaagttcgggcaatacacgtctattcataaggacgtagcccgcgtttacggaggaaccgaagacggcagctacgcacaggcgccgaaggagaatactccggccgattacgatccgagaacacgcacttggtataaagacgctgtgaaggccggcggcacgctcgttgtcaccgacccttacaccgcggcaagcgacggcagcatggtcgttaccgtggcaaagcagatgcaggacggaacaggcgtagtggccatggatattacgattgaccagctgctgaagcagatgcagggaatcaaaatcggacaaaaaggattcgtgtttatcacgtccaaaaataaaacctatgtcgcgcataaagaccacaaaccgggcgacaaagtttcaaccccgtggctgaatgaggtatacagcaaagacagcggcattatttcatacaagctcgatgatcaaaataaaaaaatggcgtttacgacaaataaactgaccggatggaaaatagaggggggcatggagctcaacgaaattaaagacgcctcacaaccggtgctgacgatgggaatgatcgtccttgcagcatccattatcatcgggggaattttaattctgttgattgtcagatccattacgtcaccgctgaaacggcttgtccgctcttctaaacaaatcagcggcggagacttgactgaaaccattgatatccgctcgaaagatgaattgggcgaactcggcgcgagctttaatgaaatgggagaatctctgcgcggactgatcagcgcgattcaaaactctgtcgacaacgtggccgcgtcatcggaggagctgaccgcttcagcttcgcagacaagcaaagcgacggaacatattacaatggccattgagcagttttcaaacggaaacgaagagcaaagcgaaaaagtcgattcaagctcagccaagctgaatcatataaatgacggactcaccgccgtttcccgcacatcatcatccattacggaagcatctaaacaatcgaaggaagctgccggcaccggggaagaatatgtgcagcaaaccgtcgggcagatgaatctcatcaatcaatcggtccagcaggcggaagcggttgtaaaaggccttgaggccaaatcaaaagacatcactcatattttaagagtcatcaacggtattgccgatcagacaaacctgcttgctttaaatgcagccattgaagcggcaagagccggtgaatacgggcggggcttctcagtggtagccgaagaagtgcgcaagcttgccgtccaatccgccggttctgccaaagagattgaaaaactcattcaggaaattacggctgagattaatacatcacttcacatgttcacatccgttaatgaagaagttcaatcaggacttgccgtgacggaccgcacgaaagaaagcttccagaatatcttcggcatgacaaacgatatcgccgagaagcttcaatcgatgaacggcacggttgaacagctgtcagacagctcccagcacgtttcagccgcagtgacggatattgcggacgtatctagggaaagcgcagcaagcattcaggatattgccgcatccgcagaagaacagcttgcatcaatggaagaaatcagcacatccgccgatactttggcgcaaatggccgaagaactgcgggaattaacgaaacaatttaaaatcaactagtaaaaaaggacgctttccggatggaaggcgtccttttttatagtgacagccggataattgaataaaaagtcttgcatacaaagggagtacatagaactatttttcatttatgacttaattttcaatgtaataaaaagggagtcggccgatataaacagtaaatgattgaaagaggtttacaaaattgaaaaaaacagcaaaaaaaatcgccagaaaatcaatagccaaaaaactgatcatttcatttttactgatcttaatcattccggtagcagtattggctgccggcgcctaccgttcggcggcttcatccgttgaaaagcaaatgatggaaagcgccgaaggaaatgtgcaaatcttaaacaatatgattgatgaccggatcggaatgtttacaaaaagctctgcatatttcagcgaatgggcgacaagcgctaaatttaaagaaaaaaaccaaacggaaatgcaagaaaggttcaagcagtttattgaaagcaatgataaagcgtccgccgtattttcaagcagcaaggaaggaacgtttacccgttatccgcatgccgatatgccggccgatttcaatccgcttgaaagaagctggtatcaggaagccatggagaataaaggccaaaccatcatcacagacccttatgagtccatctcaaacaaaaagatggtcgtcaccatggcccgcgcggcgcaagacggatcaggcgtcgtcgccattgatataaaaatcgacgatctcatcacgatgacaaaagaagtgaacatcggaaaagaaggatatgcctttatcctcagcaaaaataaaaaagccgttgcctacagtgatgaaaaagccggctcggcggtatcgggaaaatgggttgatacattattcagcgggcaaaaaggcgactttgaatatacgctgaacgggaaagcgaaaaaaatggcgtacgtgaccaatgaagcgacgggctggaagatcagcggaaccatgtccgtggatgaaatcaaggatgcggcaagaccggttctgactctggccgttatcatattggcgatagccattgccgcagggatgattttcatttattttgtcatccgctcaattaccaaaccgttaaaacgtctcgtagcttcagcggaaaaaatcagcagcggagatctgacggaaaccattgatgtcagctctcaagatgagctgggcgtgctcggtaaaagttttaatcatatgacagattcactccgttcgcttattcagggaattcaggactctgttgaacatgtcgcttcttcctcagaggagctgacggcttcggctgagcagacgagcaaagcaacggaacatatcacccttgcgattgaacagttttctaatggaacggaagaccaaagtgagagtattgataaagcgacagcccaagtgaatgagatgaaagacgggctcagcgatctggcggaagcggcagccgtggtgacggaaacgtcaattgaatcggcggagatatccggcgccggtgagcggcttgtcaagaaaacagcgggccagatgggcgccattgaccaatccgtaagtaaagcggagcaagtcgtacaagggcttgaactcaaatcgcaggacattaccagcattttgcgcgtcattaacggcattgccgatcaaacgaatctccttgctttaaatgcagccattgaagcggcaagagcgggagaatacggacgcggtttttcagtcgttgccgaagaagtgagaaagcttgccgtacaatccgccgattcagcgaaagaaatcgaatccttaattcatgaaatcgtcaaagaaattcatacttcgctcggaatgctggaatccgtcaatcacgaggtgaaaagcggacttcagttaacggacgaaacggaaaaaagcttccgggacatttccgttaaaacaaatcagattgccggtgaactgcaaaatatgaatgcaaccgtggaacagctttctgccgggtctcaggaagtatcaaacgcttcagaggatatcgcggccgtctccagacaaagcgcggccggcattcaggacatcgcggcttcagctgaagagcagcttgcgtccatggaggaaatcagttcctccgccgtcacgctggaaaaaatggcggaagaattacgcgaactgacaaagcgttttaagataaactcttaattaagtctaaaagactaattttaagacaggtaaaaagtatgtttcgttatatttcttctttttggatgtgtataattacccataattgccgatatgaagggtaaacacgcaagaggagatatagcagatgaaaaaaattgtgcaaatcatcaagcagagatcgcttacaagaaaactgctcatttcttttttggccattctcattcttcctatttcaacgctggcttttatcgcctatcaatcggcggtaagcacgcttgacaggcagatgatgggaagcgcactagataatgtgcagcagattaacgatatgatcaacacaagcatcagccaaaaggaagacggaacggcatatttcagcgactggctcacaaaggatcggtacaagccgaaaaaccaatcgcaaattaccgataaattcacagagtacatgaagatcaataaagacgtggaatccatttatacgagtgacacggaaggacatttcacacggtatccggatctgcagatgcctaaaggatataatccgcttgaaagagactggtataaaaaggccgtggaaaataaggggaaagttgttgtaacagatccttaccgcacggcttccaccaatacgatggtcgtgacggtcgttcagcagacgaaagacggctcaggagtcgtcgccatcaatatgaaaatcgatgagcttctgaaaacgacaaagaaagtgaacatcggaaaatcaggctacgcttttatcctgacgaaagacaaaaaagtggtcgcccacccgaaccgcacgtcaggcacagtattaaacggggagtgggctgaacagctgttcaccagcaaaaaaggtgattttcaatacaaatacgacggccaggaaaagaaaatggcttatgatacaaacgggctgacaggctggaagattaccggaacgatgtatctggacgaaattcatgaagcggccctgccgatccttcatctgtccctgctcgttctcgtattagcgattgtgatcggaaccatcgtcatggtgctgattatccgttcaatcacaaaaccgctcaagcagcttgtgacatcatcgaaacagatcagtgaaggcgacttaacagaaacgatcgagattcagtcaaaagatgaattaggcgagcttggcaaaagctttaacaatatggccgcttcactcaggtctctcatccatgccatccaggattccgtgaataacgtcgcatcttcctcagaggagctgacggcttcagcggagcagacaagcaaggcaaccgaacatatcacactggcgatcgaacaattttctaacggaaatgaaagccaaagtgaaaacattgaaagcgcggcggaacatatttaccaaatgaacagcgggcttaaagatatggcgaaagcatctgccgtcattaccgaatcctccgccacatcagcggaagtcgccaattcaggcggaaagctcgtccaccagacggtcggccaaatgaacgtcattgaccggtcagtgaaagaagctgaacaagtggtgcgcggacttgaaacaaaatcaaaagacattacaaacattctccgtgtcattaacggaatcgctgaccagacaaaccttcttgcgctgaacgcggcaattgaagccgcacgtgcgggtgaatacgggcggggcttctcagtcgtcgccgaagaggtcagaaaacttgcggtccagtctgccgattcagcgaaagaaatcgaaagcttaatcatagaaatcgtcaacgaaatcaatacatctctcggcatgttccaatccgtcaacaaagaggtggagagcggactggatattacgaatcagaccgaaacgagcttcaaacggatttctgaaatgacgaaccagatcgccggagaaattcaaaatatgaatgcgacggtagaacagctgacagcaggctctcagcagatttcaggagcttctgagcaaatcgcgtccatcgcaaaagaaagctccgccagcattcaggatattgcggcctccgccgaagaacagctggcttcaatggaagaaatcagttcgtcttcggaaacgttatcccaaatggcggaagaattacgtgatatgacgaaacgatttaaaatagattaataggtcatagaacacccaaatgtgctgtttgggtgttttttttagtttttttaataaatcttttgtcctatctgacgatattagatttagcttttcaaagaaggagactgaaaaaatgaaacaactgatacattggatcaaacagccatccatcagcaagccgctgatcgcggcatttttagccgtattggtgcttccggtcggcatactcgcctacttcagctaccaaacggcggggagtacattagaaagcgaactgacccacagcgcccagggaaatgtcagtgaactgaacagcgtgctggaaaacatgcttgagggtaagctgaaagcgattgactacttcagcgaatcaatcacaaaggaaaaactgaacacaaaaaataaatcggtactgcttgacaacatgaagcagtatgtcaccgtaaatgacgatgtcgcgtcaatttacgccgcgtctcgcgacaaagcgttcgtgaaatatccgtccgttgatatgccgtccgattataatccgctcacgcgcgagtggtataccaaagcggttgaaaaaagcggacagccggtgtttaccgagccctataaagacgctgcaaccggacagacggttgttacgattgcccagcagacaaaagacggatcaggcgttgtggcgcttgatattaatcttggcgacctgctgaacgcttccgaacgcgtccagatcggtcataaaggttttgccttcattacaacgggagataaaaaatacatcgcgcatccgactataaaagcgggaacggaaggctccggagagtggacggaagaagtattttccaaatcaagcggatcgtttgaatacatgtttgaaggacagcagaagaaaatggccttcacgacaaacaaactgacgggctggaaaatcgccggcacattttttgtcagtgagatccatgacgcagcctcgcctgtcatgaaaatggcgctgatcatcctggcggtttctcttatcgtcggcggtattttaatcgtttttatcattcgctcgattgcaaaaccgctcaaaaaacttgtttcgacatcagctaaaatcagtgacggcgatttaacggaagtcattgacatcaagtcgaaaaatgaattcgggcagctcagccaaagcttcaatgagatgtcggcgtcactccggtctgtcatcggcgtcatccagtcatccgtcgaacatgtcgcttcttcatccgaagagctgacggcatccgccggacagacaagcaaggcgacagagcatattacactggcgattgaacaattctcaaacggaaacgaatcacaaagcgagaaattggaagaaagtgctgatcacctttcccaaatgaatgcgggcattgccgagacggcgaatgtatcggcggaaatcactgaatccgccatccaaacctctgaaacggccggaagcggagaagaattagtggcgaaaacggtcggccagatgaaaacaattgatcgttccgtacagcaggcggaagcggtcgtaaaagggctggaaacgaagtcgcacgacattaagagcatcctcaacgtcattaacggcattgccgatcaaacaaatctgcttgccttaaacgctgccattgaagcggccagagcaggcgaatacgggcggggcttctccgtcgttgcggaagaagtgagaaagcttgccgtacaatcagccggctccgcgaaggaaatcgaaacgctgattcaggaaatcgtcaaagaaatcgccacatcgctttccgtattccaagcggtgaatcaagatgtgaaggaaggcctcgatattacggatcagacggccgaaagcttcaaaaaaatctcagaaatgacgactcagatttcaggcgccttgcagcatatgaacggaacgcttgagaagcttgcagccgggtcgcaaaatgtgacaaacgcggtggaggacattacctcagtcgccaaagaagggtccgccggcattcaagacatcgccgcctcagctgaagagcagctggcctccatggaagaaatcagttcatccgccgaaacgcttgcgcatatggctgaagaactgcagcaggtcacacggaaatttacgattcagtctgaagacgaagaacagctgtagcgagctgtttcttttcctcattttaaaaaagcgatacactagtataaaagaagggagtggcagtgatgagattagaaggcaaaaaagtcatagcgcttgtcagtgacgattttgaagacttagagctttggtatcccgtctaccggctgagagaggaaggcgcgatcgttcatttaataggagaagaagcgggccgttcatacaaaggaaaatacggcgtgcccgcgacggcggattacgattttaagagcctgattattcaggagtatgacgccgtgctcgtgcctggcggctgggctcctgacaaactgcgaagatatcccgaagttttggacatcatccgtacgatgaacgagcagaaaaagccgatcggccagatctgccatgcgggctgggtgctcatatctgccggaattctcgcaggaaaaaaagtaacgagcacgcccggcatcaaagacgacatgacaaatgcaggggcacagtggctggatgaagctgtcgtaactgacggacacattgtatcaagccgccgcccgcccgaccttccgcagtatgcaaaagcgtttgctgacctgttagcgtccaaataaaaaacatccgcccgaatccgggcggatgtttttagttttgatcggcgggaaagacaattccgatttgttttctcgcttcttccataatgcttgccgtaatgaaagaacgttcaaatgtattttcggaagactcccgctgtccgtttcgaagaagattgatgaattcagccgtttcgtagtacatcgacggtttcagatcagggactgaaatgtcttccgtccggccgtcacgatagcggatttccgcccgttccggtccgtgaatgctgtccagaacgatcgtgccgtcttcaccctgaatttccgccggggcaaacgaatttgagattttcgaatgcatcagcaccgcttcaaatccgtcgtatgacagaatcaccgtgccttcgccgtcaacgccggatgctagtttatgaccggtcgcaatgacgtttttcggtttgccgaacaggacgacggccggataaatgcagtacacgccgatgtccattaacgaaccgttcgataattcaggcttaaacgcgtttagcaccgtaccgttcttatatgcatcatatcgtgatgaatattggcagtagcttgctgtgaatctcctgacgggtccgattttatgtaagtggttttgaagcatgctgaagttcggcaggaacgttgttttcatggcttccatcaagagaacgccgttcgttttggctgcgtgaatcatttcatccgtttcccttgcgttagacgcaaacggtttttcgcacagtacatgcttgccgtgttccataaaaaggaccgcctgctctttgtgaaatgcattcgggctggcgagatacaccgcgtcataggctttgctttccgccatttctttcaggctggtgaaataatgagcagcgccgtgtttgccggcgaattccgccgcgcgttcctcagttctggaataaaccgccgttaattgaaaatcatcaatagcagaagccgcctccagaaatcgttctgtaatccaattcgttccgactgttgcaaatcgaatcattgctatcgctccttctatgtattggcttacattatagctttttttctgagaaacataaatggaaaaaaggctgccagctaaagggataggaaaaattcccatagagaccggttattatttttcattacaggaacgatagtgtacaatttaagtaaaatacatatgatggaggaacaatagtggaaacattgcaaacatggggcggcagatttaaacagtttttcttagacaataaatttgtcttgtttttgcttgtattgctgctcatcggtctcaatatccttgtctttatgaagacatcatttattttcacacctattatcgtcctgctcaaaacgattgcgctccccgtcattttgacaggaattgtttattatctgcttaatccgatcgtagatatattggaaaaaataagagtgaaaagagtctattccatcctgctcctttacctcattattatagggctgattacgattacggtcgtttcaattattccgtttttaaaggaacagatcatgagcctgatcgacaatctgccgaaatatgtggatatcgttgaagatcagacgaaaagcctgatcggaagcgattttgtaaatcaggcgcaaaagacgatgaatatcaacatttccgatcttgctaataaagtatcggcgcaggcggcgacaattgcaaacagcacatttaccggagtcgggaattttatcggcgcgctgacggaagtaattatttcaattgtgaccgtgccgtttattctgttctatttgctgaaagacggcaaaaaactgccgatttatatcttaaagtttgtgcccacccgtctgaaagaacaaacgtatacgatgcttagtgaaatgaaccacagattaagttcctatatcagaggacaggtcatcgtcagcttctgcatcgggtttttattatttatcggctatctgattatcggacttgattatgcgtcactgcttgcggtcattgccgcttgtacgagcgttgttccgtatttagggccgaccattgccatcacgccggcgattattatcgcgttggtcacttcgccccttatgctgctgaagcttgcgattgtatggaccgttgtccagctcgtggaaggaaaattaatttcgccgcagatcatggggaaaaatcttcacattcacccgattaccatcatctttgttcttttaaccgccggaaagctgttcggggttgtcggcattattttagccatcccggggtatgcggtcatcaaagtggtcacgacccatctgtttgattggttcaaaatgcgttcgcatttatatgaagaagaaaaaaatgatgctggatcgaagtcataaaatcggaacggacatgatatttattataagacaggctttccttcagaggagagcttctcttttgtaaatgatgaatgaagggaagaatgggatgacactatgggagatgttcacagcagccgttttgggaatcgtggaagggctgacggagtatgcgccggtttcttccacgggacatatgatcatagcggatgacatctggctgaaatccggaagcctgatgaatccggaagccgccaattccttcaaagtggtgattcagctcggttcgattctggcggtggccattgtgtttaaggatcggatattacatttactcggcctcaaaaaaaacgtcacgcgcgatcagcagaagggatacaggctgaccatcgcgcaaatcgccgtcggtcttgttccggcggcggtgctcggttttttatttgaggatttcattgaccgctatttattctccgtcagaacggtcgcttacggattaattgccggagccgtgcttatgcttatagcggactggatcaataaaaggaaagaaacgatcgatacggtagacagaatcacctacaaacaggctttctgtgtcggattattccagtgtctcgccttatggcccggattttcccgctcaggctcaacgattgccggaggtgtcattgtcggcttgaatcaccgggcagccgcagacttcacatttattatggctattccgattatggcgggcgcaagccttctgaagctggtgaaatactggagcagtctttcttatgacatgattccgttttttctagtcggctttatctgcgcctttgtcgtcgccctcttagtcgtcaaattttttcttcggcttattaaccggattaagcttgtcccgttcgccatttaccgtgtcatcctcggcatcattttaatcatgctcgttcgataaacgaagaggcccccggagggtcttctttttatgttcgaaaagcgtctcaggaaaatatgagcaaactgaattttctgcttgaaattcaaagaagactcgtctataataaaacatgacgttacagcacggggccatagctcagctgggagagcgctacgctggcagcgtagaggtcaggggttcgagcccccttggctccatacctttaaacccttattctataagggtttttttatttgtcaggaacagagccaatagccctaaaaagcaattggggacaattttgggacgaaaaatttattttgaggaagtttagttgcttttcgccttcaattaggattgaagaagccgcctctaaaggcggctttgttgtttatcaattttcttgcggagcaatctttgctggtgtagcaccgcagaacaggaagaatgtaaataatactggtggagaaattgctacacctaatttgcctatatattccaatactgtccaccaatctcctttttcaattgccttttgaactttatctaatgctcctttagagataccaatagcatcttcaaggcatctttgaacagtgttcttttggacacttgcatacttatattccttgttcatatagttagcgaaggcgatcataccctctttttgacctttggtataaggagacttttcaagctcaccctcattaactgtgtaacctgtttcttcatcaaaaattacaatcttagtaaagatgtactcaacttcttttaaagatttttcaatttgttctttagttaatccatctaacccgttctcttcctctgctgaaactgttggcgctattgtagcaatagcaagaagtagggtcaacgccagaaaaactaatcttttcaacattataactcccccttttggaaaattgtacaagcaactacatggtaacacatttttttccaaatgagggtatgtttatccggttttaatctgtttagacaggataagtcaaatatcgacaaaaaagattatgaccataaactcaaagcaagagtcgaaaccccccatgctattatcccaaacattacagagaacctaagacaagcttcaaattttgaaagccctcgctctctttttgttttacctaatttccaataaatagcgtatccggagaacaccaaaatgattattccaagtcgtgtcatgttttctaaaaattctataccatccattgattttcacctcgtttttatttatgagaaaaaataaagtagacttgtagagagtctacttatacacgtttatccaaagtacacatttctttagagctgagaacgcttgagtgataaagtaaggctcattttaaaatggcacatccttatcccctccccatttgtattcccgacacattagttttattatcgcaaatagaatggccatttccaacagttatgtgaaaataagtaatgcgtaatatgtctaatggtataagaaatgatgtatcttttatccaacaaaatcatgattttataatcactgtagaccgcaaacaaattgcggttttttttcgttcaaacataatttggaaatgttagaatattatataaaaggaggagtggccttgtgagttctgttttaccatcatcggaggttggcgttaagatcaatgaatggtacaaaatgatacgtcagttcagtgttccggatgcggagattttgaaagtggaagtggaacaagaaataaatgagatggaagaagacgagtatctactgatttactacaccctcatgaaattccgccatcagcttatgctggattatttagaaccggtgactacccgcgtgagaccgacaattgacgagctgctggaaaaaatcgaagcatcaaataaaggaatttccggcctgctgtgctattattctttatttttccgcggcatgtatgaatttgatcaaaagcagtatgtaaaggcgatcggcttttatagagaggctgaaaaacaactcgttcatgtgcatgatgaaattgagagagcggagtttcattttaaactggctgaagcatattacggtatgaaacaaagccacgtctccatgcatcacgtaaagcaagcgctcgatatttacgatcagtatgagttgtataaggtccggaaaattcaatgtctatttgtcgtatcagggaactatgtagactttaaacgttatgaaaaaagcttgccgcatttagaaaaagctttagagttgtcgaaacaagtaaacaataatgaaaggctgctcagttctgcttattacaacataggaaagaattacggagacttagaagaatacaataaagctgaaatctacttaaaaaaagcagcggagatatctgaaaagtataaattgggtaaccttccgcattccttgtttacatacgcaaagcttctatttaaacaagggaaaacaagcgaggcgattcaaatcagcaaaaagggactttcatcagcgatatttcaaggagataagctgtttgaatctctgcaaaaatatttggaggctttatatattaatgcaatagaccaaataggaatcaaacaaacaattgattaccttgagaaaaataaaaactattcgtatgtagaagatattgctcttgatacggctgctgtttatgcagagtcaaagcaatatgacaaatcttatttttatcatcaaaaaatgattcaaacgcaaaaacaaattcagaggggagaatgcctgtatgaattttagaaaaggcgtatttatcattgtgtcggctgtcgttttaatgtcagggatcggtctagcaacatcggctgtttcatttgatggatcttatcaagtttcgtctgatcgtaatcaaacctaagaaggagagtgcctgtatgaattttaaaaaaagcatcttcattattttgggtctgtcgttatcttttatatgcgaagtgggtgtgaacacagtggaaaaacaaacacatgatacctttcaaactgcctcagatcgtttccagacttgatcagcttacgccttttcttcggaaaaggcttttttcctttcttcattatattgtttcaaaacatccacttgtttttattcttatcccatttcagcatacgctgcctcatgaggttcttcactgcttcccggatagcgcgttcatccttgccggtttttctcttcaattcatccaaggaggggttttttccgaattggatcatgttaaagataatccggtacacttttcattcgaaatcagtcatttgatcatctcccacttcataagtctcaacggataaaagagaatcaaatacaataatgtatccacctttaagttctcgacaagagtttccttccgtatgtggtcccgtaatgaactgcgcagataacctcgcgtatgtattcgtcgtcttaaagctcgaacgataaatctatgctaatattaaaaaaatatggcactctatatttttagatcttaagaatatataagaattgataagctcaattttcaaatttaatggagggaaaatagaaaggagagaaatgagaaagtattttggaatagtgtcgcttatcatccttttattcgcattgtgctttctgcctcatattcattgggcgcttggaatcctaggaattgtcgtggggagtattctagcaatcaaatcgcctaaaggaattgcaaagaacatttcttttgttatcctagcactttgtttacttttactattattattgattgtgatgggcgttttgatggcaggtctagtggaaaattaacctttaatttattatcctatttggggaccaacttattcatttttagccaaataaaagattagggtttgaaataaaacgtctgttcgtatcaggaactcatctccacaccggcagcgtagaggtcaggggttcgagcccccttggctccatacctttaaacccttattctataaataagggttttttttgttttttcatcttctgcggcagcctctatgttctgcttcatttctaacaactcaaaataaaggaaagagagaaaatgaaaaagaaaatctatcttctactaactctttcagcggcactggcacttcttttaacagcgctcccggctctttctcccgtcgtcttcacgtctgcttcagaaaaaggagccatcaggcatgacatttataaaaaaggatatccgtatcaaagctactttgcgattcttcgaaaagaagaaggcggcggagaggccgggaacctttattatgtaaattggttcaattggaaagatgataccggacagacgccgcacgtatgttattcaaaaaaatcgtccgaaggcgagtacaaagtaagctgcggaaccggaccgtaatgatcaagagcccctcttcaatgaggggctctttctgtcaatgccgctctggctctccgtttaatatccccaatataacggcgtatcataatgccgatacggatcattcggataatgcgtatttggctgataaggcgtattcatatcatgaatccccgtgttttcagtctgtccgcagtatttatcggggcctatcacagttgattgccggatcggtgaaacggctttttcccactcatgctcattcagacagtacgtatgcgccatgatctcaggcggcgtcagacggagaatatccgagccgtatatcacttcaggcgaaggggcgtcaaatatggccaaaaggtgggttttgtctgaagtggcgacttcataatgccaccacccctgcggaacattcgccacttgtcctgaagagatcggataattccgtattttctgggtgaacggattcagcatcgacaccaccgcggaacccgaaatacagtacaccaattcagcggcgttttgatgggtatgcggttcaatcacatttgttttgctcagaaagatatctaataatgaaatattttcaagcgtgtttaactgtttaatccccaatacattgataaagttccgagcatctttcgtaaaaaaacggctctcattcacatcataagtgaactgtgtattcggagacgtgtaatcgatatcggaaaccatgcactcccccgctttcatctttaaacgtatattcccaaatatatgtgtccctgtttcaccgggtgataaaaaaaggaggtgaaatccataaattccaaatccaacacaatattgtgacgacttttttaaagattcattttcaatatatcttttattcgaaatatctcttactataaagatatattgaaaatacatctttagaagggttgaggattaacatgctggatgagagaacaatagacatcatcaaaagcacagtacccgtattgaaaacacatggagaaaacatcaccggacgcttttataacctgatgtttcaagatcatcccgaactgttaaatatgtttaaccaaacgaaccaaaagaaacagactcagcgcgcagcattggcaaatgcagtcattgcggctgcggcgaatattgatcaattagaacaaatcattccggcggtcagacagatcggccataaacacacaagcatcggtgtaaaaccggaacattatccgattgtcggaaagtatctgcttctggcaattaaggatgtgctgcaggatgccgcaactcctgagattatgcaggcatgggaaaaagcttacggtgttattgcggaggctttcatcggcattgaaaaagacatgtacaatgaagccggatggcaggggtataaagaatttacggttatacagaaaacgaaagaaagcaaagatattacatcattttatatcaaaccgagtgacggctcttcgcttcctggatttgaagcgggacaatatatcagcattaaagtgcggattgcggattctccttatacgcacattcgccagtacagcctgtctgatgcttctcaaaaaggggcatatcggatttctgtgaaaaaggacggagcggtttcttctcatctccacaatgaagttcaagagggagataaacttgaagtcagcgcacccgccggggatttcaagctgtcttctgccgaaaaaccggttgttcttatcagtgccggctccggaatcacgccgatgatgagcatgctgaaaacagccgccgaaaaacagccggagcgttccgttacttttattcatgccgcgaaaaacggagagtacgccgcgttccgcaaagaggctgaacaagctgcggagaatcatccgaatattaacattatttatgtatacagtgaaccggcagaacaagaccgctcaggagacaagcctttttacagcggcaggattgatcaaaccttcttggagcagcttcatctgaatcaagatgctgaatgttacttgtgcggatcagcgcagtttatgacgcaaatgaaagatatgattcttgccctcgggtttgactctgattccgttcaatatgaattgttcggccctcagctgagcatggcataaccaaaaagactcctcaaagaggagtcttttttatttgcgcaatatgttctttctccgtctttttccctattttattgaaattttcatcaatgaccagtaaaattataaatctagtgattccggaattaaaggaaggttgatatgaaaaagaaagcaaagaccaaaagggggcttgggtgcctttttgctgtatctcttatattcggattatttctggtatcaatggtgttttcgaaattcatagtgacggaagaaaaaccgcctgaagaggtggacgagcagcaggtctttattgacagcctttccgggcatgctcagattttatatgagaaatatcatgtccttccgagcatcaccctcgcacaggccattctcgaatcggactgggggaacagtgagcttgcggggaaagcgcgcaacctgttcggtgtaaaaggtgattataaaggaaaacacgtcacgatgaaaacggatgaatttgaaaaaggaaaacgaaaaacgattcgggcaaaattccgtaaatacagcacgttttttgaatcaatggatgaccatgccaaattatttgtcaacggaacgtcttggaataaaaagaagtataagcctgtcattgaagcggacaattataaaacagcggcggctgcccttcaaaaatccggctacgccacagaccccggctatgctgaaaaaattaaagatgtcatagaaacctataacctgaatgaatatgacaaaatcaatgcctctcttaaagcagttgatatgaaaggcgccatcaaagaccacgccattgaagacgtgtggtccaagccgtcaaaagagcggcattctattaaactggcatcggcgcaaaagtttaccggccagcatattaaagtcgtatctgaaaaacaaaacggagaatccgtctggtaccaaattcaagtgaaagatgagctgatcggctgggttgaccaaaccgccgtccagttaagtgaagaaacataagcatcaaaaaaagccggcagcccgccggcttttttacattccttcagtttcaaaccttttaatatcacgtttatgccccatcagcacaaggcagtcacattcatgaatgacagtctccggagaaggggacagctgaatgtcgccgttatgtttcacggcgagaatgctgcagccgaatctggcccggacgccgagctcaagaatggattttaaatgcagctttttcgtggctgaaagctccacgatgctgtattcatctgacaaatcaatataatttaagacgttttcatccgaaaggctttgcgcaatccgcacgcccatatccttttcgggatggataatacgatcagcaccgatcttttcaagcactttgtgatgataatagttttgtgctttcacccaaatattagggatgttcagctccttcaataacagcgtcgtcagcgtgcttgcctgaatgttggcgccgattgctacgatgacatattcaaaatttctgatgccgagcgactgaagctcgctttcttccgttgaatttgcccgcacagcatgcgtggcataagaggagtatgcgttgacccgctcttcgctgatatcgaccgcaagcacctcatgccccattttaaaaagctctttacagatgcttccgccgaaacgtccgagtccgatgacggcaaattgtttatttttgatttttcccaatcctcataactccttaagaaactgttttcgtcactccaaatacaacaaacaagaatgtactcctgtttcaagggtttgtcaatgcgagggccggaagaaagaaaacagcacgaaaaaagaccggctgacaagcgatgggcttgtgccggtccgtttttcgcaattatttgcagttgcaaggctgtgtcggcggtgtgctgcgtttttgaacaacaattgtgtcctcagcatagaatttagagccgatgcttaatgatttattttctgcacggaacttatatgtacctgcagcaggcaatgttttattattaagagaaagcttaaattccgctgcgccgagcaaatcaatgtttaacggaagtctgactgttttgccgttattcagaatctgtctttcacgcaaagcgtgtccgttgactgtatcttttgttgtagccgcaaatccgctaggaagggtaaattccataacgcctaagctcaggatcgtgttcggacggtacgtcaattcgatatcagaaaatgaccattcctgctggctggcacctgtatattttgcaaataaggtagcagtcgctttcgtggacatttccggctcgtgaacggttgagcctgactcagcggcgaatgacgctgtcggcagagaaagaagcaaaaccaggccgaataaacttgccatgacagttgagaaaaatttctgtttcattttcataaatccccctaaaaaaaatttgctggttgttcttaaaaaagaacgaccatacctataaaaatttaccatcaattttaatggaagtaaatggggttatgttcctatattttctcaaaaataatcaaatcacgacaaaaaacgcctgattttgattcaggcgtttttttcgtcggtttctatcggaataaatttaaaaatctccccgctctgaaccgagtcagcgagacgcttcagccaatgataataagctttcgaactttcaagctgatcatataactgccgcgcttcttcctgtaattccgcgttgccttcctcggccagcaaaacggactgcaaatccgcctgggcctgttcgatggcggacaaattcacctgaacttcacgatcccatttcggcgggaagaaattcgtgaaaaacgtaaagaaatctttttccgctacaaacgtatgcttccgtgtgccgcggtgaaaggtttttttgaccacatttaaatcctgcagctttttgacgcctgtgctcatactcggtttgctcatctgcagttcctcacgcatttcgtcaagcgtcatttcatccctcatatacattgttccgtataaaatcccgacactccgggtgattccgtaaagatccatcgtctctgcaatggaatcaatgacaagatccctggcttgttctatagctgcgaattctggattctcatccatactgtccctcttttcctcttgaagtttaaatttgttaagtcatttctttatgttcttaatcttaacgaatcatgacaaaatgtcaaaatctaaacggactgaccgggttttgacaggtaaaaaaacatgtgttaaattaatattgttaaaaacattaaatttttatttaacaaacttacttttcggtaaggaggactcttatgagcaaaacgctttatatcggcggcgaatggatcagtgcagaaaaaaaacagacgcgccgtatcattaatccatttaatcaagaagaaattgcaacggtatgcgaaggagaccgggatgatgcggtgaaagccatcgccgcagccagaaaagcatttgatgaaggggagtggccggtgctttccgggctcgagcgcggacaatttgttctgaaaattgcggaattaatcagacgcgatctgaacgaattagctgagctggaatcgctcgatacaggaaaaacgattgaagaaagtaaagccgatatggatgatatcgcaaatgtatttcaatattatgccggtttggcggataaagacggaggcgaggtcatttcatctccgattcccgattccgtaagtaaaatcgtcagagagcccattggcgtatgcggacaaattacgccgtggaactatccgctccttcaggcgagctggaaaatcgctcctgctcttgcggccggaaacacgatcgttttaaagccgagcgagattactccgctgacaaccattaaagtctttcaattaatagaagaagccggtattccgaaaggggtcgccaatctcgtgctggggccgggcgcctctgtcggcgacgagctggcgagaaacctcgacgtcgatttggtctcttttacgggcggaattgaaacaggcaaaaaaatcatgcaggcggcaagcggcaatgtgaaaaagattgctctggagcttggcggcaaaaatccgaatatcgtattccaagatgcagatctcgaaacagctgcagatcaagcgctgaacgccgtgtttttccatgccggccaagtatgttcggcagggtcccgtcttttggtggacgaagccattcatgatgaatttttagccgagctgatcaagcgcacgaaacgcatcaaattaggaaacggttttcatgaagatacggaaagcggtccgctgatttccgccgagcatcgggccaaagtcgaaaaatacgtagaaatcggcatcgaagaaggggcaaaactggaaacaggcggcaaacgtcctgatgatcccgcccttcaaaacggtttcttctatgaacctactattttctcaaactgcaagtctgatatgcggatagtccaagaggagatcttcggccccgttttaacagttgaatcattttcttctgaagaagaagtgatcagacttgccaacgataccatttacgggctggccggagcggtatggtcgaaggatattgaaaaatgcgaacgcgtagccgccaaactgcggatgggaacggtatggatcaatgatttccacccgtatttcgcgcaagcgccatggggcgggtacaaacaatcgggcttcggccgcgaactcggcaaaatcggtctggaagaatacacggaaatcaaacatatttaccgcaacacgaaacctgcggctgtgaactggtttcaagcataacgaggaggagatacaatatgacattaaatatgaaagtagaaagcatgcataaattccatacattcgaaatcccgacagtcattaaacacggaatcggtgcgattcagcacgcgggaagtgaagtcagagcgcttggcgtcacaaaagcgctgctcgtaacagacccgggaatttataacgcaggagtggcaaacccagtcattgaatctttgcaggaagtgggcatcgaagtcgtcctgtttaacaaagtggagccgaacccgcctgtacgtcttgtaaacgaaggatcagaactgtataaaaaagaaaactgcaacggtcttgtggctgtcggcggcggaagctccatggatacagcgaaagccatcggggtagaagcgacacacgaaggaagcgtgcttgattatgaagccgcggaaggcaaaaagccgctggaaaaccgtattcctccgctgacaacgatcccgacgactgcgggaacaggttcagaggtcacacaatgggcggtcattacagatgaagaaagagaatttaaattcaatacgggcggaccgcttatcgccgcgcatttaacggtcattgaccctgagctgcacacgtccatgcctccgcatgtgacggccatgacaggtattgacgcacttgcgcacgccatcgagtgctatacgatgaaattcgcgcagccgatcactgatgccgtcgctttaatggccattgaatatgcggcgcattatattaagcgcgcgtttgcggacggagaggatttggaagcaagatacggcatggcgcaggcggcgatgcttgccggcctttcatacggcagtgaatcagcaggcgcggcgcatgcgatgagccagacgctcggcggcatcatccctgtcgctcacggacaatgcgtcgcagctatgatggggccggtaatggaatacaactggaaaggctatccggaaaaattcgcccgcatcgccaaagcattcggaatcgatacaagcaacatgacaaccgaagaagcggcaaaagcgtccgtcaactggatgtatgatcttgtaaaagatttagaggtgccgagtttagaagaacaaggtgtgtctccggacatgattgaacgtttatcaaaagaagccatgaaagatccgcaaactttcggaaatccaagagatttgaatgagaaagcatacaactggatttacaaacgctgctttgacttaacgccgaaaacggtataataaatgaaccccgctcctttacagagcggggttttttaaggataatgtcaagaaaaaggcggtggtggctgatgtggaaacgcataacagcaaagacggaaggcgtatatatagcggataccgaacaatttgttaccaaaaagatggacaagcttcgcgcggaatacggcgggttccccggtgacttgcatttcggactgacaaaaaaggccggcgcgcgtgagccgatgtatgaaagaggaacagaaatttttaaccggagacagatttcaatcgtgtccatggaggaatgtgatgacattgcggagaagatggggatttctcatatctttcccgaatggctcggcgctaacatcgcaatcagcggtttttctgcactgacgccgcttaaagaaggaagcagaatgatatttccaagcggtgcgtctctgttgtgcgagggagaaaatgatccgtgcattcagccgggagaagtcattcaatccttttatccggatcagccaaaactcgccgcggcgtttgtgaggcacgcgatgggcagaagaggaattgtctgtattgttgaacgcccgggtgacatatgcacgggcgatgcggtcaccatccattcttatgaaccgaaacgcgccaagaaaaaaatcgagaaggtctgactcagaccttttcgattttttgtttgatttcttttatttgattaatgtgacgcttttcatgatggccgataaaatcaatccactggcggatcgtcagttcttgaaaaacaggatgcggaagcacacgttcaaagtcttcctcgtttaatgatgaaataactgcggtcagctgctgtcttgccgtatctaattcttgttttgcttcaatgactgataatcggttttgctcaggttcgaggtgtgacggcgccggccgtttatctgttctgtcctctataaactccatcggtttttcttctatttcttttaacggtgcgtcttttgcctgctttgataaaagggtctgcgctgtttcgtcaattttctttaaatggtcaaggacttcccgcacgctccactcatcagccgcgggctttcggttgaattcctcatcagagagtcctttcagttcttcccagatctgctgtctggcttcattaaaaatgctcatcctatctcctcctttagagtaaacatatcatatccggattggataatcatgtaatcagccttccttatcagaaaattgaaaccatttacctttacatccgtatataaagtaacactccgacacctcggccgaaaggaggatagaagatggacatatttcatctgccgcttgaaacggtctatctttacacattgattatttcgggaagcctcacgcttttgattctgttttttcaagatgtgtttcacggcctctcggaagccattcctgtttcatttttaaaccctgcattgattctgtcttttttaacaatcttttcagcctcaggttatatcggcgaaatcgccgctccgctatcaagttctgtcattgcgttgctttcatttgttctttcggttcttttggtcagcctgcttcacttcttcgtccttgtcccgctttcatcagcggaagaatcgctcgcttatcgggagacggatttaaagggcagagtcggcagggtcattacttccgtcccgaaagacggctatggagaagtgatcatagagggaatagggggcgccatttctaaatcagccgtcagctttgatcaagaacagatcaagtacggaactgccgtattagtgattgacgtgaaagacggagtgctttttgtgacgccgcatgaaccaatctgatatctaagggggaactgttatgactatgccgattatcatcgttatcggaatcgtattctttttactcatcgcacttattgctgtatttattacgaagtaccggacggcggggccggacgaagcccttatcgtgaccggaagttatttgggaaataagaacgtccacattgatgaaggcggaaatcgtctgaaaatcgtccggggcgggggaacgttcgtgctcccggtattccagcaggcagaacctctcagtttactgtcaagcaaacttgatgtctctacacccgaagtctatacagagcaaggcgtgccggtaatggccgacggaaccgccattattaaaatcggaggctctatcagtgaaatcgcaacagcagctgaacaatttttggggaaatctaaggaagaccgtgagcaggaggcgcgggaggtgctggaaggccatctgcgctccatcctcggctccatgaccgttgaagagatttataaaaacagggaaaagttttctcaggaagtccagcgggtcgcgtctcaggatcttgctaaaatggggctcgtgatcgtttcttttacgattaaagacgtccgcgataaaaacggctatcttgaatcattaggtaagccgagaattgcccaagtcaagcgggatgcggacattgccacggcagaagcggataaagagacgaggattaaacgcgcggccgctgataaagatgcaaaaaaatcagagctggagcgggcgacggaaatagctgaagcggaaaaaatcaatcagctgaaaatggcggaatacagaagagagcaggatacagcaaaagccaatgccgaccaggcatatgatcttgaaacagcaaaagcccgccagcaggtgacagagcaggaaatgcaaattaaaattattgagcggcaaaagcagattgaattggaggaaaaagaaattctgcgccgtgagcgccaatatgactctgaagtgaagaaaaaagccgatgctgaccgttactcggtggaacaagcggccgcggccgcaaaagcgaagcagctcgcagaagcggatgccgagcagtacagcatcgaagcgatggccaaggcggaagcagaacgcgtgagaattgacggtcttgctaaagcagaggctgaaaaggcgagaggagaaaccgaagcggaagtcatccgcctgaaaggtctcgcagaagcggaagctaaagaaaaaatcgccgaagcattcgaaaaatacgggcaggctgcaatccttgatatgattgtgaaaatgctgcctgaatatgcgaagcaagtctcagcgcctctttccaacattgataaaataaccgtcgttgatacgggaggaagcggtgaaaacggcggggccaataaagtcacaggctacgcaaccaatttaatggccggtcttcaggaaagcttaaaagcatcttccggaatcaatgtaaaagagcttattgagaatttttcaggcaaaggcaacataaaacaaagtataaatgaacttacaaaagaactgagtgattcgaacgaacggcacagcccggaataaaaaaacagcaggcgtaaaccgcctgctgtttcagttcgtccgcttagcttcaagaagccgcggcgcagtcatgaataataagataaggacaatggccgaaaggataaaagaaggaatcatataagtcgcgttatagacggacgaataaatccataccggcgtgcctttcggagcatagcttccgaaaaagaccgctccggagaccacatgtgccgcatagcgcagcacactgccgatgaaaacaccgcctataacatacatcgttaaagcgcctctttttttattcaatgccgattcccgtacaccggaagcaaacaagccgctgaaaccgagaactgcaaaggccgcgatgtaatcaagaaatagctggaccgggtgctgcaaaaacaaattgccgatggcgatctggacaatccctgtcaaaaagcctgtcgtaagcccggctttcactccccagcggaatgaaatcaaaaaaatcggaatcatcataatagagaccgaaccgccttggggcatccggagaaacatacctgagacaatgtccagaatgacagccgccccggtcataatcgctatttcaattaagcgcacaagccgtgttgaatgattcatagttttccccctggtcagacaaccgtaacaaggataaacaaaaaagcagcgcggggaaggatgggaaaaggtccgcgcgctgcttgcataaactgcaaatcatttggctttgccacatccctacgccagcgttaactaacaggttcaaagggtcagaacaaaatgttcactctcagctttaatgctccccttgtggtcatcaagtatttagttcaatcttactatacaagaaaatatgccaaaccacaagacagcttatctttctatagaagagaaactgaaataagtattaaagaaaataattaatgatttttttaaaaaaactattgtcatattttcaaaagggtgttatattattaaacgtcgctgatgaacaacagacaacaacgaaaagcttcgcaaacaacttaaaaaaagttgttgacataaaagaagctgagtggtaagataataaagctgcttcaacaagcggtaatgatctttgaaaactaaacaagacaaaacgtacctgttaattcaaagttttaaataaatcgcacagcgatgtgcgtagtcagtcaaactactttatcggagagtttgatcctggctcaggacgaacgctggcggcgtgcctaatacatgcaagtcgagcggacagatgggagcttgctccctgatgttagcggcggacgggtgagtaacacgtgggtaacctgcctgtaagactgggataactccgggaaaccggggctaataccggatggttgtttgaaccgcatggttcagacataaaaggtggcttcggctaccacttacagatggacccgcggcgcattagctagttggtgaggtaacggctcaccaaggcgacgatgcgtagccgacctgagagggtgatcggccacactgggactgagacacggcccagactcctacgggaggcagcagtagggaatcttccgcaatggacgaaagtctgacggagcaacgccgcgtgagtgatgaaggttttcggatcgtaaagctctgttgttagggaagaacaagtgccgttcaaatagggcggcaccttgacggtacctaaccagaaagccacggctaactacgtgccagcagccgcggtaatacgtaggtggcaagcgttgtccggaattattgggcgtaaagggctcgcaggcggtttcttaagtctgatgtgaaagcccccggctcaaccggggagggtcattggaaactggggaacttgagtgcagaagaggagagtggaattccacgtgtagcggtgaaatgcgtagagatgtggaggaacaccagtggcgaaggcgactctctggtctgtaactgacgctgaggagcgaaagcgtggggagcgaacaggattagataccctggtagtccacgccgtaaacgatgagtgctaagtgttagggggtttccgccccttagtgctgcagctaacgcattaagcactccgcctggggagtacggtcgcaagactgaaactcaaaggaattgacgggggcccgcacaagcggtggagcatgtggtttaattcgaagcaacgcgaagaaccttaccaggtcttgacatcctctgacaatcctagagataggacgtccccttcgggggcagagtgacaggtggtgcatggttgtcgtcagctcgtgtcgtgagatgttgggttaagtcccgcaacgagcgcaacccttgatcttagttgccagcattcagttgggcactctaaggtgactgccggtgacaaaccggaggaaggtggggatgacgtcaaatcatcatgccccttatgacctgggctacacacgtgctacaatggacagaacaaagggcagcgaaaccgcgaggttaagccaatcccacaaatctgttctcagttcggatcgcagtctgcaactcgactgcgtgaagctggaatcgctagtaatcgcggatcagcatgccgcggtgaatacgttcccgggccttgtacacaccgcccgtcacaccacgagagtttgtaacacccgaagtcggtgaggtaaccttttaggagccagccgccgaaggtgggacagatgattggggtgaagtcgtaacaaggtagccgtatcggaaggtgcggctggatcacctcctttctaaggattttaacggaatataagaccttgggtcttataaacagaacgttccctgtcttgtttagttttgaaggatcattccttcaaaacataggaacacctgctaaatgcgccacttcctgtggcaacgcatgtgttagcacgtcctatgcgttgttctttgaaaactagataacagaagtaattcacattcaattagtaatgcaagatatcacgtagtgattctttttaacggttaagttagaaagggcgcacggtggatgccttggcactaggagccgatgaaggacgggacgaacaccgatatgcttcggggagctgtaagcaagctttgatccggagatttccgaatggggaaacccaccactcgtaatggagtggtatccatatctgaatacataggatatgagaaggcagacccggggaactgaaacatctaagtacccggaggaagagaaagcaaatgcgattccctgagtagcggcgagcgaaacgggaccagcccaaaccaagaggcttgcctcttggggttgtaggacactctgtacggagttacaaaggaacgaggtagatgaagaggtctggaaaggcccgccataggaggtaacagccctgtagtcaaaacttcgttctctcctgagtggatcctgagtacggcggaacacgtgaaattccgtcggaatccgggaggaccatctcccaaggctaaatactccctagtgaccgatagtgaaccagtaccgtgagggaaaggtgaaaagcaccccggaaggggagtgaaagagatcctgaaaccgtgtgcctacaagtagtcagagcccgttaacgggtgatggcgtgccttttgtagaatgaaccggcgagttacgatcccgtgcaaggttaagcagaagatgcggagccgcagcgaaagcgagtctgaatagggcgaattgagtacgtggtcgtagacccgaaaccaggtgatctacccatgtccagggtgaagttcaggtaacactgaatggaggcccgaacccacgcacgttgaaaagtgcggggatgaggtgtgggtaggggtgaaatgccaatcgaacctggagatagctggttctctccgaaatagctttagggctagcctcaaggtaagagtctcggaggtagagcactgattggactaggggcccctaccgggttaccgaattcagtcaaactccgaatgccgatgacttatccttgggagtcagactgcgagtgataagatccgtagtcgaaagggaaacagcccagaccgccagctaaggtcccaaagtatacgttaagtggaaaaggatgtggagttgcttagacaaccaggatgttggcttagaagcagccaccatttaaagagtgcgtaatagctcactggtcgagtgactctgcgccgaaaatgtaccggggctaaacgtatcaccgaagctgcggactgttcttcgaacagtggtaggagagcgttctaagggctgtgaagcaagaccggaaggacttgtggagcgcttagaagtgagaatgccggtatgagtagcgaaagaggggtgagaatcccctccaccgaatgcctaaggtttcctgaggaaggctcgtccgctcagggttagtcgggacctaagccgaggccgaaaggcgtaggcgatggacaacaggttgatattcctgtaccacctcctcaccatttgagcaatggggggacgcaggaggatagggtaagcgcggtattggatatccgcgtccaagcagttaggctgggaaataggcaaatccgtttcccgtgaaggctgagctgtgatggcgagcgaattatagtagcgaagttcctgattccacactgccaagaaaagcctctagcgaggtgagaggtgcccgtaccgcaaaccgacacaggtaggcgaggagagaatcctaaggtgatcgagagaactctcgttaaggaactcggcaaaatgaccccgtaacttcgggagaaggggtgctctgttagggtgcaagcccgagagagccgcagtgaataggcccaggcgactgtttagcaaaaacacaggtctctgcgaagccgtaaggcgaagtataggggctgacgcctgcccggtgctggaaggttaagaggagcgcttagcgtaagcgaaggtgcgaattgaagccccagtaaacggcggccgtaactataacggtcctaaggtagcgaaattccttgtcgggtaagttccgacccgcacgaaaggcgcaacgatctgggcactgtctcaacgagagactcggtgaaattatagtacctgtgaagatgcaggttacccgcgacaggacggaaagaccccgtggagctttactgcagcctgatattgaatgttggtacagcttgtacaggataggtaggagccttggaaaccggagcgccagcttcggtggaggcatcggtgggatactaccctggctgtattgaccttctaacccgccgcccttatcgggcggggagacagtgtcaggtgggcagtttgactggggcggtcgcctcctaaaaggtaacggaggcgcccaaaggttccctcagaatggttggaaatcattcgcagagtgtaaaggcacaagggagcttgactgcgagacctacaagtcgagcagggacgaaagtcgggcttagtgatccggtggttccgcatggaagggccatcgctcaacggataaaagctaccccggggataacaggcttatctcccccaagagtccacatcgacggggaggtttggcacctcgatgtcggctcatcgcatcctggggctgtagtcggtcccaagggttgggctgttcgcccattaaagcggtacgcgagctgggttcagaacgtcgtgagacagttcggtccctatccgtcgcgggcgcaggaaatttgagaggagctgtccttagtacgagaggaccgggatggacgcaccgctggtgtaccagttgttctgccaagggcatcgctgggtagctatgtgcggacgggataagtgctgaaagcatctaagcatgaagcccccctcaagatgagatttcccattccgcaaggaagtaagatccctgaaagatgatcaggttgataggtctgaggtggaagtgtggcgacacatggagctgacagatactaatcgatcgaggacttaaccaatttgaatgtatgcttactgttatctagttttgagagaacactctcaatggtttggtggcgatagcgaagaggtcacacccgttcccatgccgaacacggaagttaagctcttcagcgccgatggtagtcgggggtttccccctgtgagagtaggacgccgccaagccattacacgcaagtgtaatatacggaggattagctcagctgggagagcatctgccttacaagcagagggtcggcggttcgagcccgtcatcctccaccattcctatcatacataagttggcgtattaagccggtgtagctcaattggtagagcaactgacttgtaatcagtaggttgggggttcaagtcctcttgccggcaccacctttatatgttatactatataagtctcttgtaataagagccattagctcagttggtagagcatctgacttttaatcagagggtcgaaggttcgagtccttcatggctcaccatgtttttcttgcggatgtggcggaattggcagacgcgctagaatcaggctctagtgtctttacagacgtgggggttcaagtcccttcatccgcattgccaaacgcggaagtagttcagtggtagaacatcaccttgccaaggtgggggtcgcgggttcgaatcccgtcttccgctccaactatactataccatccatgccggggtggtggaattggcagacacacaggacttaaaatcctgcggtaggtgactaccgtgccggttcaagtccggccctcggcacttattgttgcgcccgtagctcaattggatagagcgtttgactacggatcaaaaggttaggggttcgactcctctcgggcgcgccatacatacttttgaaaaacgggaagtagctcagcttggtagagcacatggtttgggaccatggggtcgcaggttcgaatcctgtcttcccgaccattttggggccttagctcagctgggagagcgcctgctttgcacgcaggaggtcagcggttcgatcccgctaggctccacttgattttaattgttttttggcggtgtagctcagctggctagagcgtacggttcatacccgtgaggtcgggggttcgatcccctccgccgctaccattggacctttagctcagttggttagagcagacggctcataaccgtccggtcgtaggttcgagtcctacaaggtccaccacttatacggaggaatacccaagtctggctgaagggatcggtcttgaaaaccgacaggggtgtcaaagcccgcgggggttcgaatccctcttcctccgccatatctaatttaattatcatcgcggggtggagcagttcggtagctcgtcgggctcataacccgaaggtcgcaggttcaaatcctgcccccgcaaccaaaaaatggtccggtagttcagttggttagaatgcctgcctgtcacgcaggaggtcgcgggttcgagtcccgtccggaccgccatttataaaaaggctcggtagctcagttggtagagcaacggactgaaaatccgtgtgtcggcggttcgattccgtcccgagccaccatttaatttaatattgttttggcggttgtggcgaagtggttaacgcaccagattgtggctctggcactcgtgggttcgattcccatcaatcgccccaaacaacatgcgggtgtagtttagtggtaaaacctcagccttccaagctgatgtcgtgggttcgattcccatcacccgctccatttttatattgtcatgggcctgtagctcagctggttagagcgcacgcctgataagcgtgaggtcggtggttcgagtccactcaggcccaccatgatgattttccacagtagctcagtggtagagctatcggctgttaaccgatcggtcgcaggttcgaatcctgcctgtggagccatacggagaagtactcaagtggctgaagaggcgcccctgctaagggtgtaggtcgtgtaagcggcgcgagggttcaaatccctccttctccgccataaggcccgttggtcaagcggttaagacaccgccctttcacggcggtaacacgggttcgaatcccgtacgggtcattaaaaaaaccttgcatactatgcaaggtttttttattatgcgttcatagtgtaaatggtaaaagacaggtatgtggcaaaagcgctccataataaataagggaccagaagccaggctgaagctttactgtatttaccggcaatgagcaacagaatgagtgttgtcacagccacaagcaggcaatcgatagatgcagcaagcaaatttttctgtgtgaattgaaaatagctgaatccttgattcacgatataattgatgagaagcatcacccaaaaagctttggattctttacatgaaaactttgggtatatcaaggctgctgagagcgaaataagcgcaaacaaaaccgcccatatgatgccgatcactgatccgctcggcgtccagtcagttttttgcagcgcgtcataccattcacggtcgatgggaaagagaacccccgctaaagaaaacaagacatatgtaatgataaatacaataatcgcaccgatatacttctttttcatttgttccctccgtcattcaatgtcaatacgttagttcccttttttggaaatattaaaccttttaaaaggttcatgcatcattaagtgtatgagttttcagtgtaaaaatgcagcaaaccatttatttgtattcaaaaaccccggcaggccggggttttaatcagcatgaagatcgccgaaggtcgtcataattccttgttcgtccaattcctgttcatatttttcgtgtgctttgcttggatacacggaaatgtttttgccggtaatatctgtcgcgataaagttttcataatcctcagcatagccgatgttttcttccgagttcattgtcatatccccatagctgagcggaggatcctctaaatcctgaggcgtttctgagtttccgtattcctcaacatcctgataagcatcttcactatcgtaagccgcccggattgattcatcatcatcaaattcaaactgtccgaacggagtttcctcttcaatcggcctgtctttggaaacggcatcctgcgaggaatattccgccaatgtcgtagccgtcggcagagcttcgagtctgtcataaggaatgtccttgccgctgacttcacatgtgccgtatgtgccgttttcaatttgtttcagagagtaatcaatatcgcgaaggtgctctcgttcatggtcgagcagagccaggtctttttcccgctcgtataattcggtcgcctgatcgccgggatgattgtcataggaagacaattcgccggatgactgatacgggaattcatcagttaactgaaatttgtcattttctttaaagcggcttaaaatatcatgtctggcttcttctaattctttttttaagtgtgtaatctgttcgtttgtaagcacatcaatccctcgtttctatgtgatacttactgttagtatgaacgcttttgcgcagaaaaatggtggataaaaatagtcattttcccatgaggaagtaaaaggatacagtgattgccgagagtggggaaagaaaattcaagtttgtttctttattcatttgcgcaaaaaggtttataataagaaatgcaggcattttgtcgtgctcacatctgtgtgtttgacacaaagtcatcacaggtgtattgtattaaaagcatttaacggattatggaggaatgtctcatggtgacaacggtgcagcatacgttccgagaggaagcagatcatgcattacataaagccaaacaagtcaaccatgctgtcttattgagctattcaagacgtattgcgtctttagaccctctatcatttttcaaagacggagcaaaaaaatataaaggcaaacgatttttttggtcagaacccggtagtgaattaacaatagtcggtcttggcacagaagcgctgttccaatcgaatgaaaaaaatggaaagcgttatcacgacgtttttgaacaatgggagcgctttaaaaagacggcttttcatattcatgaagaagaagaggcggcgcataccgcggtcggccctgtcttattcggcggtttttcatttaatcctgctgaagagagaggagacgaatggaacgggttcgaagaaggactgttctttatcccctcactcatgctgacaaagacggcagatggtgattatttaaccgtcaatcaatgggcggcagacggtaatctggcagaagatacgctgaaacgtctgaaatctttttcggaagctttttcagtttcttcaatcgagtatgaagaatatcctgttttaacaaaagcggaagaacttgatgtggaaaactggcttgaagccattaaaacagcaacaaatgatatgaaagcaaatcaatatgataaagtcgtgctggcaagggaagtcgttttgtcatatgatgggcctattccggcggagagcgttgtccgcaagcttttgacggaccaaacgacaagctatgtttttgcgattgagcagggagataaatgctttgtcggcgcttcaccggaacggctgatcaaaaaatccggcaaagacgttatgtccacctgtctggcaggttcaattaagcgcggagaaaatcaacaagaagatgagcgtctcggcaaagagctgctgcatgacgaaaaaaatctcgcggaacatgattttgtggttcagatgatacacgattctttcttgtcgagctgcagcgatgtgaaaaagcctgcaggtccgcaattatataaaacaaaaagtgttcagcatctatatacaccgatcacaggccatcttaaaacgtccgcttcgctgtttgatttaattgaaaagctgcatcccacaccggcattgggcggagctccccagcagaaagctgttgaagttatcgctgatattgaaccgatgacacgcggatggtacgcggcaccgatcggctggatggacggcagggaaaacggagaatttgtcgtggctatccgatcagggctgattgaagacaaaagtgcgcggcttttcgcaggctgcggcattgttgaagattcagatccgcaatcagaatatgaagaaacacaaattaaactaaagccgatgatctctgctttaggaggtgaaaggctttgacaaacccgattacacattatatcggaagctttattgatgaattcgctctatcgggtgtcaccgacgcagttgtttgcccggggtcgaggtcaactcccttggcggttttggcggcggcccacccggatattcaagtccatatacagattgatgaacgatccgcaggttttttcgcactcggtcttgcaaaagcccgccagcgtccggtcatgctgatttgtacgtcaggaacggcggcggctaacttctatccggccgtgattgaagctcattattcaagagtgcctcttattgtcctgactgctgaccggcctcatgaattgagggaagtgggggcgcctcaggcgattaaccagcattttctgttcggtaactttgttaagtttttcacagactcggctctgcctgaggaaaatcctcaaatgctgagctatatcagaacattggccggcagagccgtaagtgaagccgggaagcgtccgatggggccagtccatatcaatgtgccgctcagagagcctttgatgccggatttatcagccggaccttttgaaagaatgagaaaggggcggcacgtctcagtcacaacagggattcagtcagctgctcaagactctctctgtcatattacagagcgtctcgcgggtaccgaaagaggtatgatcgtctgcggcgaaattcacggtgaagcagaaaagcagcaaatcatcgctcttgccgagatgcttcagttcccgattttggctgatccgctttcaaacctccgaaacggggagcatgataagacgctgattattgatgcttatgactcgtttttaaaagatgaagaaataaaagaggcgctgcgcccggacgctgtgatccgcttcggcccgatgccggtttccaaaccgctctttttatggctcagagatgatcctgccattgagcagtttatcgtcgatgaagacggaggatggagagatcccacccaggccggcgcgcatatgattcattgccatccgtctgtgtttttggaagcggtccgttcagctgaaaccggaaaacggccgtccggatggcttgaaaaatggcagtttgtcaatgagcggttccggagtcatttacaggccgcgagcatggatgatttatcatttgaaggaaatgtatatcgtcagcttcagcaccttgtccctgaaggcagttcgatttttgtcggcaacagcatgccgattcgcgacgtggatacgttctttgaaaaacaagatcgttccttccgtgtttatgccaaccgcggcgctaacggaattgacggagttgtctcctcggctatgggactgtgtgaaggtacaaaagctcctgtcacgcttgtcattggagatttatcgttttaccatgatttaaacgggctgttagcggctaaaaaacttggaattccgcttacggttattttaataaacaatgatggcggcgggattttctcgtttttgccgcaggcatctgataagactcattttgaagaactgttcggtacgccgacgggtcttgatttccggcatgccgccgcactgtacggcgggacgtatacttgccctgagacatgggaagcatttaaggatgcgtatcagccgcaggcggacaagcccggacttcatataatcgagctgaaaacagatcggacatcaagagttcaattccatcgcgatctgctgcaggccgcagtgcgggaagtgaaaaaagaatggaaactgtaacagttaaaacggccgacggcgtatgctatcgtgctgctgatagcggacacgaatcatctgaagctattgtttgtctgcatggatttacgggcagcaaagaatcatggatgtttttacgcggcatgtttcccggcgaacgaatggtgatgattgactgcctgggtcacggggagacagacgcgcctgtgcaagcggcaaggtacagtgcgagccggcaggttgcggaccttgccgccgtttttgatcaattaaaacttcacaaagtgaaacttattggttattctatggggggaagacttgcgtattcctttgcacaggcatttccgcatcgggtgtcagcgcttgttttggaaagtacaaccccgggcctcagcacgcttcaggaacgcaaaaagcggattcagtcagaccggaagcttgctgactttatattgcgggaaggtataacatcgtttgtcgattattgggagggcattccgttgtttgccacgcagctttctctgccggacagcgtaaaggcgtccatccgtgccggcaggatgaaaaataatccgtccggacttgcaggcagcctgctcggaatggggacgggctcacagccttcctggtgggaggcattacaccgcatcaaagcacccgttctgctcatatgcggtgaatgggatgaaaagttttgcgctattaatcaaaaggtgcataacctgctcccatcaagtaaaatagaggttgtcaaacaggcggggcacacggtacatgtggaacagccgcgaatttttggtaagatagtaagtgagtttttatacggcttgtaaagcataaagaaaatagcttttcggccggactcaggcaaaaatgaaggaggtcatatcaatggctgcagaatggaaaagtgaacgtcagtacgatgaaatcctgtacgagacgtataacggtattgcaaaaataacaattaaccgcccggaggtacataacgcatttactcctaagacggtatcagaaatgattgacgcgtttgcttgtgcgcgtgatgactccaatattggtgtcatcgttcttgcgggagcgggagataaagcattctgttcaggcggagaccaaaaagtccgcggtcacggcggatatgtcggagacgatcagatcccgcgtctgaatgtgcttgatcttcagcgtttgatccgcgttattcctaaaccggtcgtagcgatggtatcaggctatgccatcggcggaggccatgtgcttcatatcgtctgtgatttaacgattgcggccgataacgcgattttcggccaaaccggaccgaaagtgggaagctttgatgccggttacggctcaggttacctggcgcgtatcgtcggacataagaaagcccgtgaaatttggtacctgtgccgtcaatacaacgcgcaggaagcgctcgacatggggcttgtcaatacggttgtcccattagagaaacttgaagaggaaacaattaaatggtgtgaagaaatgcttgagaaaagccctacagcccttcgtttccttaaagcggcatttaacgcagatacagacggcctcgccggaattcagcaatttgcaggagatgcaacgcttctttattacacgactgacgaagcgaaagaaggccgcgattcctttaaagagaaacgcagtcccgatttcggtcaattccctcgttttccgtgatcagatgacactacgaaacagcttgagccgctctggtccaagctgttttcttttcaaaaacagtacttttacctcggagatgataacatgctgacagaacagccgaattggctcattcaaagggctcagctgacaccagagagaatcgctctcatatttgaaaacaaacagatgacattcagagaattatatcatgcttctaaacaaatggccgcgcggctgtccaaatactgctcgcttaaaaaaggagaccgggccgcgattttgctttctaacagaccggaaatggtttatgccgttcacgcctgcttcttattaggggcggaagctgtgctgttaaatacgaagctctcaaaacaggaacggttgtttcagctcgaagattcacaggcaaagcttttattgacggaggacggtttttgccgcgaagattatgaatctgcagtcgccgctgcggacgtggacgagctgcaggccaaagccgcgggagacattgaacctgaagcttatgtaacgcttgatgatacggcgactcttatgtatacgtcaggaacaacgggaagaccgaagggggtgcagcagactttcggtaatcattattccagcgctgtatcgtctgcgctgaatctgggggtcacggagcgggaccgctggcttattgcgctgccgctgtttcatatcagcggtctgtctgcgctgtttaagtcggtcatttacggcatgcctgtcgtgcttcatcaaaaattttctgtcactgatgtgctggacagcatcagctcccatcaggtcacgatcatttcagcggtgcagaccatgctttcgggcctgcttgcggaaactgaacaatgtcctgaatcactgcgctgcattctgcttggcgggggtccggcaccgctgccgctcctcgaagaatgccgcaggaaacaatttccggtattccaatcttacggcttgactgaaacctgctcacagattgtcacgctttctccggaattcagcatggacaagctcggctcggccggtaaaccgctgttttcatgcgaaattagaattgaaaaagacggaaacccttgtgcgccgtttgaacacggtgaaattacggtgaaaggcccgaatgtaatgaaagggtattaccatcgtgacgacgcaaaccaggccgcttttcataatggatggtttaaaacgggcgatcttggctatttggatgatgaagggtttttatacgtgctggacaggcggtcggacctcattatttcaggcggagaaaacatctacccggcagaagtggaagcggcgctgcttgcccatccggctgtagcggaggccggtgtttcgggagccgaagatccgaagtgggggaaagtgccgcatgcttttctcgtgctgacttcttctgtcagttctgaggagctgaccgccttttgccgtgagcggcttgcaaaatataaaataccggctgcttttttcgaggttgacgggctcccgcggaacgcgtccaataaactgatgagacatcggctgaatgagcttcgtaaaggagaattgtcatgattaagattgaaaaaatcaccctttatcatgtaagtatgaggctgaaaaaaccgtttaaaacaagtattgaaacgctgcaggatcgtaaatttttgatcgtggaagcgatcgatgaaaccgggagaaccggctggggggaggtatcggcgttttcttctccgtggtatacagaagaaacgattcagacatgcgcgcatatgctgagagattttttcatcccaaatgtcgtaggccgcgagtttttccatccgtcagaagtgcctgacagtctcgcgcgtttcaaaggaaaccgcatggcaaaagcggggcttgaatcagccgtgtgggatctatatgccaagaaaaaggggatatctctcgcagaagccttagggggcaaaagagataaagtgcccgccggcgtggcggtgggtctggcttcggctgatgagatgcttcgggaaattgagcaatacgtaaaagaaggttatcaacgtataaaaataaaaattcagcccggccatgacgttgatctggtcagatccatccgcagccgttttccgaacgtaccgctgatggcggatgccaactcggcatatgaactgaaagacatcagcaggctgaaagagttggatgaattccagctcatgatgatagaacagccgcttcaggcagatgatattgtcgatcaccgccacctgcagaaacacttgagaaccgcggtatgccttgatgaaagcatatgctcatatgatgacgcaaggcgggcgattgagcttgggagctgtaaaatcattaacataaaaccggcgcgtgtaggaggcctgacagaggctttaaaaatacatgacttatgcagagagcatcacatgccggtttggtgcggcggaatgtttgaaaccggcatttcgagagcgcagacagtcgcgcttgcttcgctgccgcaatttacgataccgggtgatatttcctcatcagaccgatactgggaggaggatattgtcactcccgacatacgtatcgaagagggattcatctctgttccggacggtcccggactgggtgttgaagtcaatcaggaaataatgagaaaatacgtcacccaaatggacgtttttacgacaaacaactgataaaaagacatttcagcgagttgagctgcctgtatgctgctgttatattgaaattgttcattatcaccccttcccccgtttgaaccggctgtatcagccggtttttttaataggcggatgcgatgatttttttattcttcaaacagtgtcggctttacatcgcaggtgttgctttctggctgggcaaacatgtacatcttgataaaaaattctgtgcttgtcatgaatgcgatactgatcgtaccgtctgccgcctatatttgccgacgaaccgcctttctgccatgcttctcatccgcgcgattttccccggctcaagggctgatttcaaaaaggcttgcggcacggaaatgaaaaagagctgtataaaacagctcttttcttttataaatcatgcggtttaaaggttttgcaatccgtttcttcacttttttcagcggtttcgcctgtatggctgaccacataaatcgcgtcggccgtgcatttgtttcctctgccccaatatgaacagttattgacttcacacagaattttttggtccatgctggctcccctccaagataaaaggtacgccattagtatgagccgccctgatttttgttattcctcctggcggatataacgtctgtctttcataaagagcttccagaagaaataaaacccgggaaacaaaatgatgaaagcgacgatatacgtcataaacagcgccctgaaggttgccggctccgtaaatcctgacatgaccgtaatatccggataaatcatataaggaagatgcgcccgtccgtatgcatagcttgccagaaagtattgaagcgcaatggcgatcatggcgattctcggtttgccgaggttgcggccgaagcgcttattcggcaaaaacagagccacgccggcaatgataaatgtgatgacagacagaatgagccatgtcttgtctttcatcatccccgtatacagccagccggcttcagagcgtaatgtcagcataatgaagaaggcgaaaagaagcgacagcggccctgttagtaaagagctccgtctgtagatgcggtacgcatgctcctcttccgcaacatttgaaaaatcggccagaagcagtgaagataaaaataaagtgcttaaaatggcaaagccgataaacgcatacgcattaaggcttgtaaagacatttgccaaattcagttgatacactccgcccgtcttctcaataaaccctccgtgtgtgaccggaaggaccaaaatcagcacagcgggaataatgaaacctgaaattccggagatatatctcatgatttttctttccttcgccgtattggagaagacgagaaagccgctgcggatggctaagagcagcaaaataatacttcccgggatcaataaaacggttcccagcacgaaggttgcccctggaaagaagctgaatagggcgacaacgatcgcgacgataaagacgttggtcacttcccatgtcggggacaaataacggttggcgatgtttgtcgcctttgtttgttctctatttaaataaatcatcgaccaaaagccggctccgaagtccatcgttgccatgaccgcgtagataaacacgaagccccatacgattgatatcgcaatgagagcatccatggtaatgtccattttaattcagccctttctatagttaggattccgcagcttttacatcctcctcaacgggatgtttgcggaaataataaagcagcacataaatgactgcggctgccaaaatggcgtaaaccactgtaaacaggatgaacagcaaaccgattgaaccggttgtcgtgacgacatcagacgttttcaggagatggtaaatcacccatggctgccgccccgtacaagcgaatatccacccgaattcaattccgatcagactgagcggtcctgcggttaaaaataaaatcaaaagccaagtcggaaagctgtctttctttaaaatttttctccacacgatgccgatgattgagtacaaaatgagcagcattccgatgccgaccattccgttaaacagtgtatggatgaataaaggcggccactcgtctttcggaaacgcgttcaatcctttgacgacggtatcaaagctgtttgcagccaaaaagcttaaagcccacggcacttctatcgcccattttactttttcttcttttgcatcagtaaaacccccgatcgcaagcggagcgtgtgatctagtttcaaacagcccttctgcgcccgcaagcttctcaggctggtattcgtaaagaagctgggctgactcgtgaccgtttaaagaggcaataatggagaatatcccgccgatcgttaaggcgagcagcagcgcttttcggtgaaagcggtatacctgctcctgttttctcgttctcagcattttataagccgcaactgacgcaacgataaatgcaccggtcatgaaagccgtcagtacgacatggcccgcggtggtgaaaaagcttggattaaaaaacgctgcccaaggttcgacgtcagtgattttgccgtttaaaattttaaagccggccggcgttccttcaaatgcgtgaacatttgtgattaagacggcagatgccgcggcgccgatcaaaacgaaaataacggcaatgatgcgcatcgccggagtcagccggtcagcggcgtagacataaatggacataaacagcgcttcgataaagaaagcataaatttcaatctgaaacgggagtgacatcaccctgccgatgacttccataaatccgggccacaaaagggcaagctgtgtacccgcgatcgttccggtcggtatcgccacgccgagcagaacagcctgcgccttcgtccaccgttttgccataatggcataatgcggatcttttgttttttggtaaatcaattcagccattaaaatcatcagaggcaagccgacaccaagcgtcgcaaaaataatatgaaagcccatggttgtaccgaacaggcttctggctaatactaaatcatccacgatcataaaccgcctttctaaattaccgttttatgtaatgtggctatattatttgctgaagcgattagattattcttccgattccatatatgtgcagggtttagaaatcaagggatcagggcatatatgattgacaagcggatatttaaggcttaaaataaaacgtaattattacgatttgagaaagggagatcagcatgaaaaaagatattcatccggataaccatcaagtgatttttcaagatgtgaacagcggctatcgctttttaagccattctacgaaaacgtcagcggaaacggcagagtgggaagacggaaaaacatacccgctgattaaagtggaagtcagctcagatacccatccgttttatacaggccgccaaaagttcaacgaaaaaggcgggagagtcgaacagttcaataaaaaatacaatatgggaaaataagacaagcccaatggggtttgtcttatttattgagcactttgtcatctcgtgcggggagtgacgaaatgacccgtcttatgttatattgtgaataaaaaagcagaaaggaaacaccaagatgagtcttctaaatgatatcatgcaatttaatgagcagttcactaaaaacaaagattatgaaaaataccaaacatctaaattcccggataaaaaaatggcgattttgtcctgtatggacacacgtcttgtagaattgcttccgcatgcgatgaatatgcgaaacggcgatgtgaaaattattaaaagtgccggcgcgcttgtcgcccacccgttcggaagtatcatgcgcagccttttagtggccgtatacgaattaaacgccgatgaagtctgcgttatcggccaccatgattgcggcatgagcaaaatcaacagcgaggatatgctcgataaaattatcgaccgcggtattccgaaagagcggattgacatgctgaagcactcaggagttgatcttgatcaatggctgaaaagctttgattcagtagaagcgagtgttacagacagcgtaaacgtcattaaacaccatccgctattccctgacaatgtgccggtgcacggtctggtgattgatcctgaaaccggtaaacttgatctggtgatcgacggctaccagcatatggactaatgtttttcttttttgtccggtacgggatcaacaccgcccggatgaaaagggtggcactttaaaatccgcttcagtgtcagccatccgccttttaatgcgccgtgagtcttgacggcttcgattccgtactgcgaacacgtcggataaaagcggcatgacggcggcgtcagcggagagatgaacttctggtatccgcggatgaaagcaatcattatggttttcatcaaaaaaccacctttctgatgctagtatagaaaaaaaatttcagattgaaaagcttccgtcacaattcttatcggaaaactgtgttataatggatgcatattctgaaaaaaagggagtgccattatgccttcagtagaaagttttgagcttgaccataatgcggttgtggctccgtatgtaagacattgcggagtgcataaagtcggaacagacggcgtcgtgaataagtttgacattcgcttctgccagccgaacaaacaggcgatgaagccggataccattcatacgcttgagcacttgcttgcgtttacgattcgcacacattctgagaaatacgatcacttcgacatcatagatatctcaccgatgggctgccagacaggctattatcttgttgtcagcggcgagccgacagcggaagaaattgtagacctgcttgacgctacgctgaaagaagccatcgatattacggagattccggcggccaacgaaaaacagtgcggccaggcgaaacttcatgatttagaaggcgcgaaacgtctgatgcgtttctggctgtcacaggataaagaagatttgctgaaagtgttcggataaaaaacaggcctttttgctgacatgcaaaaaggcttttttacatatttctaaaaaatgtcacaccttatgtgtaagcgtttgctaaaatagaagcaaacatgaaggagtgatgggatgaaacgggctgtattggcaggtatgtgcggtatggtatttctattatcttcctgcgggggcaattcggacaaaacctccgcggatgaagagcctaaagcgcttgaggtcaagcttacaggaccggaaacgactgcaccgcatgaaaaagcggaatacaaggcggaagttttttacggcggcaagcgtgtcacggatgcggatgaagtcatgtttgaagtatggaaagaaggaaaaaaaggcagcagcaaaacaagcaaggccaaggaggaaaaaggggcgtatcacctgcggactgaatttgatgaagagggtgtgtataccgttcaatcccacgtaacggcaaaacagcagcataatatgccgactgtaaaagtgcgtgtcggggatgctgaagctgccgatgattcctccggccatgaggaacagacgcatcatcattaaggattttttttatccgtcaagccttttgatgcgtcctccggcgggtcaatcgtatgttttacattataagctcttacagtcgaccagatggataaaagcagcacggcgagcacgataagaaagccgaagctcagaagaagcagcatgaaatccctcctttttaacaaatcataacatattttccatccgtaaaatcaagggctaaaaatttatgttttaacacacgatatatagggtatatcaatagtaaaccaaaggaggaagataggcatgtcagaaaaactattggatgcagtcaataagcaagttgcaaactggacggtcatgtatgtgaaattacataattatcattggtacgtcaaagggaaggactttttcacattgcatgaaaagttcgaggagctgtataacgaaacggctacatatattgatgatctggcagaacgtctgctggcattaaacggcaagccgatcggcacaatgacggaatcattgaagacagcgtctgtaaaagaagcggaaggcaatgagagcgcagaacaaatggtacagaacatttatgatgatttcactgtcattgcggaagagctgaaaagcggcatggatctcgcagatgaggtaggagacgaaacgaccggtgatatgctgcttgccattcaccagaatatcgaaaaacataactggatgctgaaagcgtatttgggataatcaacaagggaagaccggggctataaagcactcggtcttttatttggctgccgaagagaggtgttgtccatttttctgaaaaatccagtccgttccattcacttttcatagaataatgtaaggccgtttctgtgaaaggatgttggatcaagtgggcaaagactttggcatcttttcgttttttgcagtgatcgtgtcggcagcggggtttttcttcggaggttttcagtattcgtttctgattttgctatcggtcatggcgattgagtttatcagtacaagcttaaaagaatctcttttgcagcagctgagcgcaagaaagctttttgcgcggctggtcaaaaaaatcgtgaccctggcattagtctcagtttgccatttttttgaccagctgcttcataccgaaggcgccatccgtaatttggctatcatgttttatatcttatacgaatcggttcagatcgtgattacggcaagctcgctgggcataccggttccgcaggtgctcgtcgacctattggatactttgaaaaataaattcaagcgcaaaccgtaacatttgcttcaaaggaggctatactagcgggtatgatggttttcctctgaatttttgataaagggcttccgaacaaacgcaactgtggtatgatgtatggaagatatgaaggaacggattagagggataaacatgtacgagtttaaagactattatcagaacactgttcagctctcctttgaacaccagcctttttcagacagcccgaagcacgtatgggtcatatgccgatatggagataagtggcttttgactgagcacgaagaccgggggtttgaatttccgggcggaaaagtggagccgatggaatgtgcggaggaagcggccctgcgcgaggtgaaagaagaaaccggcgccgcggtaagacatctgaagtacgtcggacagtataaagttctcggcagggaaaaggtaatcgtgaagaatatttattttgccgatattgaaaagcttgaacaacaggctgactattttgaaacaaaggggccggtgctgttcagcgaactgccggagaatctcccgcgaaataaaaaattcagtttcattatgaaagattcggtgcttccgatcagtctgaaaaagctgaaagaggacggcgtatttcaatcataaaaacgaagacccggcgtttacgcacgggtcttttttaaatttttcctttcgtccattttctttctaacagttcgactccctgatacatcaatgtcgcaaaaatcgcgatgatcagaaggcttaagaacacaagagtgaaattgaagacctggaatccgtaaatgatcatgtagcccagacctttttcggaaacgagaaactcgccgacgatgacaccgacccaggataaaccgacgttcactttaagcgcggaaataatcgcgggggcgcatgccggcagaatgacttctttaaacatgatgcttcttttcgctccgaaggttttcatcaccttaatatagttttcatccacttcctgaaaagccgtaaagacgacgattgtcgtgataatgacactgatgactgctcccatggcgacaatgcttgtgaaattcggtccgagtgccacgatgagaatcggtccgagtgcgaccttcggcatcgcgtttaaaatgacgaggtacgggtctaaaacccgggcgagcctgtttgaccaccataacaaagcggcgaggcatgtgccgaggagcgtgccgagcaaaaagccgagaacggtttctcctaaggttacgccgatgtgcgccgcaagggatccgtccgcaatcttttcaactaaaagcctgcaaacggcggagggtgagctgaagattaacggatcgatccagcccgccctgctcgatatttcccagccggcaaaaaatacgatgaaaatggcggcctgatacgcacggatccggagcttttctttttggtgtcttttcttaaactgctgatgaagctgttcaatcgtgccgctgctgtttttcaagggaattcagctccttccatatggtttgaaacagcggctgaaaggccggatcctgacgcgcgtcaaacggatctaaagccgcgagctccttaggcacggtgaatatttggtggatggtgcccggctgattcgaaaataaatagatcgtatcgctcatggcgatggcttcaccgatatcgtgggtgacgagcacggcggttttttgaaaatcctttaatgttctgaagacaaggttttccaaagaaagcttcgtttgaaagtccagcgcggaaaacggttcatcaaggagcagcagtcccgggtccggtgcaagagttctggcaagtgccgcccgctgccgcatcccgcctgacagctctttcgggtatttcttttcaacgccgattaatccgagcttaggcagaaggctgagaacttcagctcttttttcttctgttaatgtttttgaaatgtgtaaaccgagcagcacgttttcctcaattgatttccaaggaaataaataatcctgctgaagcatataaccgatttggtgttctttatggttcggcacgcttccttcaatcagcacccggccttgcgcaggggtgataagaccggccagaatggacaggagtgttgtttttccgcatccgctcggtccgagaaaggagatgaaatcccctttttcaatctgaaaatgtatatctttcacggcggttgtcttttctttcagcgagaaataagtatgtgttacatgatccacatgtaaaaaagacattcatgttcctcctattgttctgaggtgacttttttggcgatttttgtgttgacgagtttgctgtacggaatgtgtttcggaagctctccggcctcatccataatagattgaagctgttcccattcatccttttgcagaactgggtctgcagagaatgacttttgttttttatatcgctctattgatgtttcgataatggccggatcggtatcggcaaattccttctgaatcgtttttgcgatgtctttggccggatggctttccacccattgctgggcgcgatagatggcgcgggtgaatttttccgccgtcttttcattggttttcaaataactttcttttgccataaaggttgtgtatggcatttggccggaagcttctccgaaggatgcgacgatatggccgatgccttctttttcaaattgggatgccgtcggttcaaacagctgcacataatcacccgttccggatgcgaatgcgttggaaatattggcgaaatcaatgttttgaacgaggttaatgtcttttttcggctctatgtgattctttttcaggacgtactcaccggccatttggggcatgccgccttttcgctggccgagaaatgtttttccttttaaatcgctccatttgaatgatttctcatccttccgtgacacgagaaatgtgccgtccgtctgcgtcagctgcgcgaagttgatgaccggatcttttgctccctgcgcctccacgtaaatggatgtttcagaaccgaccagcgcgatatcagacccgtttgacaaaagcgatgtcattgttttgtctccgccccatgttgtttgaagtgacacttggagcccttcttttttaaagaaaccttttgcttcagcgacatacagaggcgtatagaagatggagtgtgtgacttccgccacctttacctttgtcagactttcttcctgtctgcaagccggaagaatgagcaggaaaaaggcgcatatgacaaaaacgcagcccgttttgagccatttgttcacggtgtaacctccttgttttaagcgttaaaataaccttttctgctttacatatcgtatgatgggtataaaaaatgtgtgagtgcccatattcaggttgggaaagaataaaaaaactgatgatataaggaggccattgttttgctggcagaaaagaaaaggttcccgtctccgagtccgcatatccgcctctttgaggtatgctatgagtcagaagggctgaaggtaaaggggcttcttgccgagcctgcggcgccgggaacatatgacggttttttatatttgcgcggcggcatgaaaaatgtcggcatggtacgccccggaagaatcgttcaattcgcttcccaaggctttgtcgtgtttgcgccctattacagaggcaaccagggcggcgagggaaatgaagattttgcgggagaggacagagaggacgcgttttccgctttccgcctgcttcgggagcatccgaacgtcagagaagggcgggtgcatattttcggattttcccggggcggaatcatggggcttttgaccgcgattgaaatggggcatcaagcggcttcgctcgtatcatggggcggtgtgagcgatatggtgcttacttatgaagagcggaaggatatgcggcggatgatgaagcgggtgatcggaggcacgccgaaaaaggtgccggatgaatacagatggcgttcgccgtttgaaaaagcagaccgcattcaggcccctgtgctgctcatccatggagagaatgatgagaatgtttcgatcgaacacgcccgaatgatcgaggacaagctgaaagaggcggggaaaccggtggaaacttggtattacagcggttttacgcattattttccgccgcaggaaaacagacgcattgtccggcggctggcggaatggatgaagacacggtaagatgcctgatttatgatatgataataaagaataagagaatgaaaggggattttcattttgggaatgcctgttgaatttaataccatgattgtgacaaaaggcaatgaaaaacggatagaggaaaatatctttttattggagaaagagggctaccgcgtctatcctcttgatattccgatggacgtgcgcaaaacgaaaaccggcgagaaatccggcaccggcgaggtccaaaagctcgaatgggcgaacggccggacaagcattacatacagactcacgtcgctccattcgacaaactgaaaaaacaaaagccgagggcataaacgcccttggcttttttgattacacgagaggtccgccggctttggcaatcgagtccgcatgggaaaactttttaaagttttctttaaactcattggccaaaaacagcgctttttcgttgtatgcttgtttatcgctccatgtgttttcaggctgaagaacttcatccggaacgcccggaacatgaacgggactgcgcaggccgaaaatgctgtctgccgtcatgtcagtctggttcagtctgccttcaatagcggccttgaccatcgctcttgtatacgaaagtttcatccgttctccgactccgtaccctccgccggtccagcctgtgttgaccaggaagacttgaacgccgtgttcgtcgattttatgcccgagcatttcggcatatacatgcgccggaagcggaaggaacggtgaaccgaagcacgtcgagaaagtcgtttgcggagatgtcacgccgcgctcggttcccgcgagtttactggtgtacccgcttaagaagtgatacatcgcctgttccttcgtcagtttgctgatcggaggaagcacgccgaatgcgtccgccgttaaaaagacgatcgcctgcggatggccggcaatgctcggctgcacgatattgccgatcatctcaatcggatatgcggctcttgtgttttccgtgtagaaggaattgtcgtaatccgcttcacccgttttttcatcaagcacgacattctcaagaacagacccgaagcggatcgcacgaaaaatctgcggttctttttcctcgctcagattgatacatttagcgtaacatccgccttcaatgttgaaaacgccggaatctgaccagccgtgctcgtcatcgccgatcagtttgcggtccgcatcggctgaaagcgtcgttttccctgtgccggaaaggccgaaaaacagggcgacatcgcctttttcaccgacattggctgagcagtgcatcggcagtatatcctgctgcggaagcaggaagttcataatggagaatattgattttttcatttctccggcgtattcggtgccgccgattaaaatgacgcgcttttcgaaagagacaatgataaatgtttccgaatgcgtgccgtccgtctccggatctgctttaaaatgcggagctgagagaatggtgaaaggctgcgcttgcgtgtctctttcatccgtctccggtctgataaacagctggcgcgcgaataaattgtgccacgcaaattcatttacgaccgtaatcgggagtctgtatttttcatccgctcccgcgaatccttcaaacacaaacagttcatcccgctgttttaagtagctgacgactttggcgtacagcttttcaaacgcctcttcagaaatgggctgattcaccgcgccccaatcaatttgattttctgtgctttgttcacggacgataaatttatctttaggtgaccggcctgtatatgcgccggtggtggcgcgtacggcgcccgttgatgtcagcgttccttcatttcggctgatcactttttcggtaagttttggagccgataaattatgatgcacattcggacttgcaagtaatgcttgaagatctgcggttaaatcaactaatttcataaaaaccttcctttgccggtttatttgtatttcgctgaatgtggaattagtataacatatatctgaaaatagtctatactatttgcggttttttgtttgtgtttttccattgcttcccgaaataaaggcgcgtaatcgctttaattcatattgacactttccgcccttttacgataagatatttcattgagcggatactcttatcccgagctggcggagggacaggcccgatgaagcccagcaaccggtttctctgtaaaaaagcaggtgaaaacactgtgggaaaccaaggtgctaacctgatgcaaggtttaatattttccttgagcgataagagtgaaaggcacacagaccaaaccctttcctcgagtggaaaaggtttttttatttcataaaatatgccaattaacattctctgatatagtatgacattgtattaagagggagcgagttccgtatcatatgaaaaggtcttgcaaaagatcttttttcaggaggaaaagtgaatgagtaaaaaccgtcgactatttacatctgaatctgttactgagggtcatccggacaaaatctgtgaccaaatttctgacagtatcttagatgagattttaaaaaatgacccgaacgcgcgcgtggcctgcgaaacatctgtaacgacaggacttgtgctggtaagcggagagattactacatcaacatacgttgacattccgaaaacagtccgtgaaacgattaaagaaatcggctacacacgcgccaaatatggatttgatgcggagacttgcgctgttttaacatcaattgatgaacagtctgcggatatcgcaatgggtgtcgatcaggctcttgaagcgcgtgaaggcacaatgagcgatgctgaaatcgaagcaatcggagcgggagaccaaggcctgatgttcggttatgcgtgtaacgaaacgaaagagcttatgccgcttccgatctctttggcgcataaattagcccgccgtttgagcgaagtccgcaaagaagacattcttccgtaccttcgccctgacggcaaaacgcaagttaccgttgaatatgatgaaaacaacaagccggtccgcatcgacgcgatcgtcatttcaactcagcaccacccggaaattacgcttgagcagattcagcgcaatctgaaagagcatgtcattaatcctgtcgtgcctgaggaactgatcgatgaagagacaaaatacttcatcaatcctacgggacgtttcgtaatcggcggacctcaaggtgatgcgggtctgaccggccgtaaaatcatcgttgacacatacggcggatatgcacgccacggcggcggcgcattctccggtaaggatgcgacgaaggtagaccgttctgcggcatacgctgcgagatacgtagcgaaaaacatcgtggcagcaggtcttgctgattcttgtgaagtgcagcttgcatacgcaatcggcgtggcacagcctgtttctatttccatcaatacatttgatacaggaaaagcttctgaagaaaaactgatcgaagtcgtacggaataacttcgacctgagacctgccggcattattaaaatgcttgatttgcgccgcccgatctataagcagacagctgcttacggccacttcggacgtcatgatgtggatcttccttgggagcgtactgacaaggcggatgcgcttcgcaaagaagcactaggagaataattttatagccgcttacttaagcggctttccctttttgtagatgctgccatgcttattttttacatagcgtgaaaccaatggcgtaacaaagcgtctataaaaagggggtccaattagaaaattacacttatggaggctatactatgtgtggatttgtcggtgtttttaataagcatccattaactcaaaccgcagatcaagaagagctaatcaaacaaatgaaccaaatgatcgttcaccgcggtcctgacagcgatgggtattatcatgacgagcacgtcggattcggcttcagacggctcagtattattgacgtagaaaacggcggacagcctttatcatatgaagacgaaaaatattggatcatttttaacggcgaaatctataactacattgaattgagagaagagcttgaagcgaaaggctacactttcaatacagattccgataccgaagtgctccttgcgacataccgtcattataaagaagaagctgcttcaaagcttcgcggaatgtttgcgtttttaatctggaacaaagctgaccgcgtcatgtacggcgcgagagacccgttcggcattaaaccgctgtattacacaaccatcggggacaaagtatattttgcatctgaaagaaaaagtttaatggccgctcaaaacggcattgatcttgatacagcttctttacagcaatatatgtctttccaattcgttcctgaaccgagcacgcttgacgctgaagtgaaaaaagtcgagccgggcagccagtttacgatccgtccggaaggcgacatcgcgtttaaaacatatttcaaagcgaacttcaagcctgttcagtctgatgaagataaattggtgaaagaagtcagagacgcaatctttgactctgtcaaagtccacatgagaagtgacgtgcctgtcggttcgtttctatccggcggtattgactcttcttttatcgtctcagttgcgaaagaatttcacccgagccttaaaacattttccgtcggttttgagcagcagggcttcagtgaggttgacgtagcgaaggaaacggctgccgcgctcggaattgaaaacatcagcaaagtcatttctcctgaggagtatatgaacgagcttccgaaaatcgtctggcactttgatgacccgcttgcagatccggcggcgattcctttgtactttgtcgcgaaagaagcgaaaaaacatgtaacggtcgcgttatccggggaaggcgcggacgagctgttcggcgggtacaatatttaccgcgaaccgctttcgcttaaaccgtttgaacgcattccgtccggtctgaaaaaaatgcttcttcatgtggcgtccgtcatgcctgaaggaatgagagggaaaagcctcttagtccgcggctgcacaccgcttgaggagcgttatatcggtaatgcgaagatttttgaagagcccgtgaaaaaacagctgctcaaacattacaatccagagctttcataccgtgatgtcacgaagccgtactttacggaaagccgttcatacagcgacattaataaaatgcagtatgttgacatccatacgtggatgcgcggcgacatcctgttaaaggctgacaaaatgacgatggccaactcattggaactgcgcgtgccgttccttgataaagtcgtgtttgacgtggcttctaaaattccggatgaactgaaaacgaaaaacggcacgacgaaataccttctgcgcaaagctgctgaaggggtagtgcctgatcatgtgcttaaccgcaaaaaactcggcttccctgtgccgatccgccactggctgaaaaatgaaatgaacgaatgggttcgcaacatcattcgtgaaagtgaaacagatgcttatattgaaaaggattatgtccttcagcttctggaagatcattgtgccgacagagcggacaacagccgcaaaatctggaccgtgctgatcttcatgatctggcacagcatcaatgttgaaaaaagactggtgccggaagagctgaatcatcagccgaaagaagtcatttttgtttaatccaaaaggctttcgatgttatcgaaagccttttttctattgttttttgtaaaccgtctattccgctctgttttcgacaaagtattacgcaatattcagaaaaaggttataataggactaatcgggtagattccggaaagtgttttctggctatttcgtctcggtttgtgtttctttgtcaaaatcagggggagggagagttatgcaaaacaaagaaaaaacgcttcaccgcggcttggaagagcggcatatctcgcttatgtcgttgggcgccgcgataggagtcgggctgtttctcgggtcggcttctgccataaagcttgccggaccggggattttagccgcttacgcctgcagcgggctgattatgttttttattatgcgggcattaggggaaatggcgattcaaaagcctgtagccggctcattcagccggtatgccagagattatctcggtccgcttgccgggtttttaacaggctggaattattggtttttatgggttgttacctgcatggcggaaatcaccgcggtcggcatttatatgggctactggttccctgacgtgccgtcatggatctgggcgctttgtgcactcgtcattatgacggctgtcaactttctggcggtcaaagcgtacggtgagcttgaattctggtttgcgctcattaaagtcttggcgattctgtcaatgatcgcgatcggtctggtgatgatcggattcggcctcggaaacggaggcgttgcgctcggaatcagcaatttatggagccacggcggctttttcccgaatgggattaaaggggtgctgctgtcgcttcaaatggtcatgtttgcctatctcgggattgagctgattggtgtcacagccggtgaggtcaaaaatccggaaaaatcactggcgcgggccatagatactgttttttggcgcattctcattttttacgtcggagctttgtttgtcattatgtcaatttatccgtggcaggaaatcggttcaggcggaagcccgtttgttttgacatttgaaaaaatcggaatacccgctgcagccggaatcattaattttgtcgtattgacggcggctctttcttcctgcaacagcgggatcttcagcacggggcgcatgctgttcaatctggcggaacaaaatgaagcgcctaaagcatacggtacggtcacaaaaggcggtgtgccgggaaaagcggtattggtttcagcgggcgcgttatgcatcggcgttttgctgaactacgtggtgccggcaaaagtgtttacgtgggtgacgagcattgcgacgttcggggcgatttggacatggtcgattattttgctttcccaaatgaaataccgtaaaagcttacagccggaacaacggaaaaaactgaaatataaaatgcctttatatcccttttcctcatatatctcattggcatttctcgcttttgtcgttgtgctgatggcttttgatgcagagacccgggtggccgtcattatcggtcctgtctggttcggcatattattagccgcttattacgggaaaggtttccataaaagaaaagacataggtctggaaaacggacagacattcgccgaaaaagcgtaaaaaaagagcccgggacatgggctctttttttcataggatcgggccggcgggggaagaataaaacaaattcctgaacattttgcttctgtttcctgacaatcgggagaatgcaaatggtttttacttaaataatattttgaaaaatggtacagtagtaaaacaaagctgatctatttttatttctcttgcagtgttttatagtatcggcctttttcaacatattccgttctgattctttccatgtcccgtatgtcttcttctgtcagccggcggataacctttgcgggccggccgaacgcaagacagccgggaggaatggttttgcccggaggaacgagacttccggcgccgataaacgcgccttctccgatttccgccccgtcaagaatgacggagcccataccgattaaagcattctttttgatgattgcgctgtgcagtgtaacctgatggccgatcgtgacgtcatcttcaataagaagcgggcggttcggactttgatgcagacagctcaagtcttgtatgctgactctttttccgatccttgtcggcgcgacatccccccggatgacggctgagaaccaaatgcttgattgttctccgatcacgacgtcgcccgtaatgacggcgttatccgcaatgaacgcttcaggatgtatgtcaggcgtaaattgtttataagggtagattatcatgtctcatccttctttctctaaatttatgtaagaggtgaactgcatgtggacttggaaagcagacaggcccgtcggtaccattgtcattatccacggggcaagcgaataccacggacgttataaatggctcgttgaaatgtggagatcttccggatataacgtggtgatgggcgatttgcccggtcagggaacgtcgacccgcgccagagggcatattcgctctttccaagaatacattgatgaagtagatatatggattgataaagcgagaacgcttgaagcgcccgttttccttttgggccacagcatgggcggactgattgcgatagaatggtttaagcagcagagaaatccccgcattacggcactcattttatcatcaccttgtctgggtctgcaaataaaagtcaataaagtccttgattttgcgtctaaaggactgaacgtcctcgctccgtccctcagagtggattccggtttatcacctgatatggcaacgaggaatgcggatatgattgaagcggatcaaaacgattctttatatgtcacgaaggtatccgtaagatggtacagagagcttttaaaaaccattgatgccgctatggtgccgactgatgcgtttttaaaggtgccgcttttgcttatgcagggcggtgatgacaaaatcgtcgataaaatgaaggtccgcaaatggttttccggtgtggcttcccataataaatcgtaccgggaatgggaagggctctatcatgaaatttttaatgaaccggaaagagaaactgtgtttaaggcggcaaaagcctttacagatcagtatatttgaattcgctgggggtgcatatgttgacagtaccggaacatccttttaaccttatggcaaaagtgtatcgggaaatttttccgctcgttcatcaggaattgaacatgtggcgggaaaaatcagattccattaaaaataccgaactgcggcagcaggcggccgcaagtatccgcgataagtcgtttcattgtgaaggcggcggcattttagccctgctttcgggagaacagaaacaaaaatgcgtgcaatttatcatcgcgtatcagacaatcagtgattatctggacaatctgtgcgaccgcagcacctcgcttgatcccgaggacttccgcatgcttcatctctccatgcgtgacgcgctgacggtcggtgccgaggtgcggccgtactatcagtacagagacgagcaggatgacggcggttatcttcatgagctggtcagaacatgccagcgggtgctcgggtcaatagaacattacggtatcattaaaccttatttgcttgagctgtgtgattattattgcgaccttcaggttcataagcatgtcgttgagcatgaacgcgttccgaggcttaaaggctggtttgagcagtaccggtcacagcttccggaaatggagtggtttgagttctcggcctgcgccggatcgacgttaggcattttctgtctcgttgcttactcattccagcctgattttaacgaacataccgctgagaaaatccgcagcagttattttccgtacatacaagggctgcatatactgcttgattatttaattgaccaggaagaggatctgcttgaaggcgatctgaatttctgtacgtattatcagtctcatgaagaaatgatgcagagactgcagcattttattgaaaaagcggatgaacatttgcaaggcattccgcatgaaaattttcaccggctgatcaacagagggctgctcggcgtctatttatccgatgacaaagtcgccggccaaaaagaaatgggccgcctcgcgcgaaagctgatcagggctagcggaaaaacgtcatttttcttttatatcaacggaagagcctaccgcaaatttcagaagatggcttggacgaaaagttcgtaatgggtgaactgcgcctctcgtgtaaatcatgacggcgcagttttttatttatgacgtgaagtatgaaatgaaacattgtttgcgcctgcagaatatgatactttaattttatgaaaaaattaaagtatttagcggtcatagcattactttccatttccggaggctgctccgtcatccatgcttccgccggctatcatcctgtattgatagcgcacaggggctcttctgcgattgagccggaacatacagctttgtcttatgcgcgtgccattaaagacaaagcagattatattgagatagacttacggaagacgaaggacggccatctgattgcaattcacgataaaacggtagatcggacaacagatggtaaagggatgacagatgatctgtctttggctcagattaagaaactgaatgcgggaaaaggagaaaagattttaacattagaagaaatcatacagaaattcggacaaactgccaattactatattgagacaagagaaagcaacggcagcctggtgatggaaaagaaactgattgacatattacaaaaacataagctgatttccagccataaagcagtcattgagtcttttagcgggaagagcttaaagaaagttcgatctatggataaaaaagttcctcttgtccgattattaaaagataacgaggctgaggagataaatgataagcagctgcaaaccatcagaacgtatgctgatacagtcgggctcaacgccaaattggcaaatgaagcagtcgtgaagcgtattcatcacaataagatgaaagtgcacgtgttttttgataaggaagacgagcatacgctgacgcctattatgctgaaacaaaaagcagatggtgtctttacaaacaatcccgcttatacacgcggcgtgctgcaacaaaacagtaaataaaaagagacatgcgcattttacgctgtctctttttttaacggtttcttttttgccgcaaggtgcattgcgaatttgccgatcagcccgatgacaaaaaatgcagcaaaccaccagtaataggtttttgcgaactcaaatcctaaatgtcttgataaaatgatgacgaacatcacatagggaacacttgaaaatatgatgcgaagaatattcaaactgccgctcctcccagatgttacacttaaaagatgaacttttttccattatttcatagtaattgatttttcagaaaaagtaaacacaaaaagaatcggcccgcttatgtcaggccgattctttatttgccggcagatttcttttcaatcgctataataaacggcgggtcgtttcgctggttgagaaagccgtagctcagcacgcgcgctttttcctgatcaagattgctgcagtactccagtaatgcacttttttccgtcttgccttcaggatgcccgtggtacacaacgagaacgatcagcccgttctccttcagcagttcaaggagctgttcgatcgcggaaatggttgagtggccgtttgtcgtaatgcttttatcgccgccgggcagatagccgagattaaacacggcgcaagccacacgaccgtgcgcatcctcaggcagcgatgcctttatttgatcatggctcttatggtgaagcgtgacgcgcggactgaagtcggcaccgagccgctccttcgttttagcgagtgcgtccgcttgaatatcaaaggcatggacatgtcctgtttcaccgacaaggctggccaggaaatatgtatcatgtccgttgcccatcgtcgcgtcaaccgtgatatcaccttcctgtgcggcggacttcagcaattctttactgaaagggaggatgtgcatcaaggtcatagggcggtctcctccccgatctttctgaagagctttccttgatagcttccccgtgtttccagctctttttgaatggcgcccagtacttcccacttattgacgctccacatcggtccgaccattaattcgatcggcccgtctcccgtaatgcggtgaacgatcatttccgggggaatgatttcgagctgatcacatacaagacttacatattcttcttgagaaaggaactccagctttcctttttcatattgcttcaccatcggtgtgccttttaataagtgaagcaggtgaattttaatgccttggacatccaaatcagcgacggctttggccgtctccatcatcatgtccctgttttcaagcggaagcccgttaatgatatgggaacaaacgcggatgccgtgttttctcagtttattgacaccctcaacatagcagtcaaaatcatgggcgcggttgatcagaagggcggtccgctcatgcacggtctgcagcccgagttcaacccacaaataggtccgctcattcagttcggccaaatattccacgacatcgtccggcaggcagtccggacgggtcgcgatcgacatgccgacaacgccgtcaagcttgaggacggattcgaatttttctcgcagctcctctaccggagcatgcgtattcgtgaacgcttggaaatatgcgatatatttgccgtctttccacttttcgtgcatgcggtttttgatatcgtgaaattgcgtgagtaagtcatcggcccgattgccggcaaaatcgccggagcccgccgcgctgcagaatgtgcagcctccgtgtgcaaccgtgccgtcccgattcgggcagtcaaaaccgccgtcaagcgcgactttaaacactttatgcccgaaatgctcccgcagatgataatttaatgtatggtaccgtttttccgtatttgaataaggaaaagggttattctcgttcaatgttcaaaaagcctccctcacatcagatgcatcctaaaattgtagcatgaatgatggagcggaacaatgaaacaattatggaacggtcaggacgtaatatctacctggtttttctgttgttgttttaaacgttttggagaaatatcactgaacaatgcaaaaataattcctaaaataagaattacactgcctactttgaatgtattattaaaactgtcacttattttttcattatataaatttgaaatttttttctggatagccataacttccttcttttgaatattgaagcttttttgtactttttctttatacggatccggggttatagagagaatttcttcctcttttttgtttaattcagcaatacttttgcttcgatcgaaacctttactgtctgaatgctttaagtgagttattatctcgttctttgcatttttatcaaaaacctgattgctttccacaattttaatggcttcttttttcgcagtagctgtgtgatcatttatattcattgtaagcacagatgtaagtatggcaattcctagcgcttgtccaactgtccgcatcatattaagaatacctgaggcaattcctactttctcaggaggaataagccgtatccctgaactcattgctggtcctattacaagccctaaagctaagccggtcaaacataacagaataattactgacgttatagaactgtcgtatcgtatgtatccatataaatatgttgtgattgttaaaccgagcatacctagacccgaaagccaaatgcccccgagtttatcagatagctttccagaaagtacagaggtaaacatagatgatagagctaatgtagaaacaattaaccccgcttctaattcagtttttcccattaaattagtgaggagtaaagtaataataagggtaccgcttgttaatccaaggccctgcataaagagggtgaaagaactgaaactaaacgtacgtatcttcagcatggataagggaatcatcgggtttttaattttagattcaataaagaaaaacaaacagaataataatacagagattacaaaaagagagataattaatggtgatgaccagcctaagtcagatacttttgcaaaaccaaaggttaaacagaagagagctccggataaaataagaatccccatgtaatcaatttttttactcactgtttcatcataactctcagtaataaaaaatgctgctaaaaaaagagaaatcagacctaaaggaatatttatgaagaagatagcttgccaattaaaattttcagttaataatcctccaagtacaggtcctaatgtagctgctaatcctgagaaagcaccccagattccaatgatcattccttttttattttgaggtacgatagctaaagctataggcattgtaacaggtacaatgaaagcagcagataatccctgaatcactctaattgtgacaagcatttcaattgaagtgctcaaacatgcaataactgatgtcaaaataaaaagtgctaatccaaacataaaagctttttttcttccaaaatggtctgccagctttgatgcacctactaataaaaccgcaaaagctaaagtataacctgtagccacccatgctacttgagaaaggttactcgaaaaataattcagcatcttaggtaaggcgatatttactatagtggtgtccattactgaaatgaatgtacctaataataatgcagataacatgattatttttttgaaattcaatatacttacatctccttttagaaaactatctaattaaaactttgacgtatgtctaaaaacataataagaaaaaaaatcatttgtgtcaatattattcataatatgtttattagacccaatatattataaaataacaaatgtattaagataaccattactttaaatctattaaaattccaaattaatactttacaaatagacaataattccttattattatttaaaagttggtttttcatggttttttttgaaaaaggaggagctaatgacccatccaattaaacttttttgcattccgcatgctggaggattgtcaagtatttatagtgaatggagtaactcagttggaccagaaattgaactaatacctgttgaactagcaggaagaggctctagattttctgaaaatccctacaaaacaataaatcaggctatagatgatattacagaattaatattaagaaaatgtgataataagtgctatgcgatttacggccatagtatgggtgcatatatatcgtatgaagtaatacttaaattaatgaaggttacagataatcttcctcagcatttatttgtatctggaaaaggcgcaccttatttaactaaggaaacatttataagcggtcttcctgataaacaagttattcaatggttaaacaaattagggggaattcccaaggaacttatcgagaattacgaactaatgaaactatttcttccagtaataaggaatgattataaactaatagaaagttacaaccacaacatcaaaaaaaaattatcaaatgttacgttaactgttttaacgggcaagtttgacgaatcaataactataggagaagttgaagggtggaaagaatattcagcaaaggaggttgatgtataccagattagcggagggcatttttttattaatgaatccgttacagaagttatatcaattattaaagataaattattggtttaagtttagtatggaggtttttaacgtgaaaaaatacttttgggctcctcatgttcactggagaaatgaaaataaccatattattattaatgattttcaatttagagggaaagtagttgaactttttcctgatatttattttcattttcaaaaaggcatttctttaagcgaaatatatgttatttttaaagactttaatccaaagattttaaaaatgtttctaaaagatttaatacgtaatagagttttagtttgcaatgtaagcacaccgacagagcttttcgaaacgcaaaacaaatttgtttatcaagaatatgacgatgagttttttttatacaaagaaaatatagaatcttataagaagaaacaattaactaggtttatgtcaaagaatactcttcaatcaattgatttggaggaatgctcagatttgccctctttagttcaaaatagaaaaagtactaggaattttgatactagtaaaatgatgaatttttctaagtttaatcggttgttaaatgtctttaaacagtctccaattcaagagggtattaaatatttctacccaagtgcaggaggactgtatcctgtcaacatatatttgtatattaaagatgggagagtcgaaaatcttgaggaagggatatatttttataatcctcacagccactctatcaatttacttaatagagtaaaactggctgaaaaaaaatatcattattttataaaccacagtgcatttaatacttcgaatttctctatctttttcacccttgattgtgatgtaatcatgcccaaatataagggtgcggggtattactatggtattcttgaatgtggtgttatgtcagctacattggctaatatagcagaatattttgatgttggatcgtgctccataggagaaatagacttcgataaaattaaagatgaatttaatttgaatagcaatgaaatctatttacattcggtagaggtaggactaaagaataaggaggtaaatcattgattaataacacgctagtaacgagtaataaatttaaagagatttctaactttataataaaaaaaattcgtgaattaagtaaagatgattcagttgatttaagaactaatatttttgattatcaaatatcttctattaatatattaaaattacttggagccattgaagatacatataatataaatattgaattttatgattatattgacaacccagatgtactgtcattttgtcaagttgtttatgaaaagtttcagttattagataataaaaaagagtataatatattacatttattaagcgatgaagaaaatgcctataaagaatttgatcttacaaatgttcaagttgcttatttatctggaagagacaagcaatttgaactggggggaacttccacccatgcttttgtagaatttgaggctgaactagatattgaaaaattcaataaaagtgtacaagctgtgatagagcgtcaacacatgctacgtgcagtttttttatcaaatggtaagcaaaaaatacttgaacacgtaccgaattataaattagctattcaagatgtgagttatcttaaaaaatcagaccaagaagacaaaatattagaagcaagaaaagtaactaacgaacgaatcttcgatccataccaatggccattgtttgaatttaaagctttaaaaatcagtgataaactatatagaatattctttgatatcgatatgttaatagcagatggagctagtatccagcttttatttaaagagatatctgaattgtacaatggaaagattcaagagcctttagaagtatcctatagagattatatgttagcttataacaaattaaagggaaatcataaatatcaggatgacaaggaatattggttaaataaacttaaaagttttccttcaacaccagctctgccagtaaaagtagatttagcatgtataaaaaaacctacttttaaaagaaagaaaaaaattattgagaaaagaaattggaatcaatttgtgaatttatgctctcggaagaatattaggcctagtatactacttttgtctatttattcaaaagtgttgtctaaatggagtaatcagcaaaatattgcgttaaacactacattatttaaaagaagacctttgcataagcagattaataacgttataggcgattttacagaaattatgatatttgatgtatgcttcaataatttaaatcatttttgggaagaagtaaaaaatattcaggataacttctttaaatgcttatcacataatgattttgatggaatagagtttaccagagaatactgtgaatttaatgatatagatagaaggaaagctgtttttccgattgtttttacaagtatgttatttgaaaatgaattaaactatttagattctctaggagtttttatagagagtatcagccagacatcacaagtttatctggatcatcaagtgatagagctcaatgatggagtcatgcttagttgggactatgtttcagaggcttttgaaaatgatgtaattgagtcaatgtttgaggaatatacccacattattgaccaattaacgtccggtgagatgatgtcttctgaagatacagcactggaacaagcaattactgattataatcaaactgagaaggccatcaagccggatactttatatcacttgtttgcgagacaaacaataaaaacacctgagaatattgcgattgagtgtcaaggaagagcagttacctatcaagagttacaagtcatgtccaaccgcatatctagttttttggaagagaagggaattcagccaaatgagtatgttggggttattgttgatcgtgagatcgagacaatcgccagtatcctcgcagtgttaaaaattggagctgcctatatcccaattaatccggaatttccaaaagaaaggcaatcatatattctgaaagatggtgattgtaaagttgtattaacagctgaactggcaaaaactattgtgtcaagctataaagagtctaaaagagaaagtgtggcagtgccggaacaaatagcttatgcgatatacacttcaggaagtacgggaaaacctaaaggtgtaattataaagaatgaggctgtaactaatactatattagacatcaatgaaaaatacagtgtgaatgaaacagaccggtttatcggattatcatctatgtcctttgatttatcaatatatgatatttttggtgctttttctgcaggagcaacattagtaatgatcgaagatcagagagatattaaaaagattcatgacatcgtaaaagaggaaaaaattacagtctggaactccgttcccatgatcatggaaatgttagtaaactatatggatgaaacagaaaacaaatctaacgctggagttattaactatgacgagcttcctgaattaagactggtattattaagcggggattggatacctgttcatcttcctgagaggattaaggatcacttcgttgaaagtgaagtcataagcttaggcggggctactgaagcgtctatttggtcgatttattatccaattaaaacagtcaaggctgaatggaccagcattccttacggttatccattatcaaatcaaacttactatgttttaaactatgaaaatgatccttgtccaatcggagtgaaaggtgaactttacatagggggaaaaggtgtagcagacggctatttaaatgataaagaaaaaactgaagcgtcatttattgatcacccagatttcggaagaatttatcgtacgggggatatgggggtcttgacgcaagagggttatattgagtttttgggacggaaagatcatcagattaaagttcgtggatatcgcgtggagttaggtgaaatagaaagtgtaatattagagcaccgacaggtgagaaatgcggtagtcattaatcaaaaggatgccagaaatcaagatgtgttatatgcgtacgtaacggggcaccaatccttaccgccaactgatctgaaagagtttttaagcctgaaagtgccggaatatatgatacctagctatatcgtacagattgaagaggttcctttaacaagtaacggaaaagttgatcgtaaaaaactactggctctagacgttacagatcaagcatcgattggaaggaaaatcaaagagcctcgaacagaaattgagagagatttagttggtatctggaaaagcgttctgaaaacaaatgaaatcagcatagatgacaacttttttgaattaggcggcaattccatattgatcattaatttaattactgctattgaggatcgtttatttattaaattagattttaaaaattttatatccaacagtaccattgagaaactagcaaaagttatcagtgtctctgaaagaaaaagtaaaacaaatagtaatgtgatggaaattcaagctgatatcaagcataaaaatacggaattcgatttaactaacgttcaaatggcttatctaatgggaagagataaacaatttgaacttggtggcacctcaacgcatgcttatttagaaattgagactgagctgaatattgaaaaactcaacaaaagtttacaaaaagtaatagatcatcaagacatgctgcgcgcggtcattcttccgaatggaaggcaaaagattcttcaacaagtccctcagtatgaaatatctgtacaggatattagtcaattaagtgatatagaacaagagaagaaaattgcagaagaaagagacagaacatcacatcatatctttaatccaaatgagtggcctttatttgaattcaaagccttgaaaattcaaggggataaacatagattatttttcgacatcgatatgttaatagctgatggagccagcatccagcttttatttaaacagatatctgaattgtataatggaaaagatgaaatggtaccattggaaataagctatagagattatatgttagcataccaaaaagtcaagaccactcaaaaatatgaaaatgataaagcctattggttaagtcagctcgaagattttccaaaagcacctgcggtgccattaaaagaaagattagatgcaataagcaagccaactttcaaaagaaaatctaaaataattgacaagcttctatgggaaacactttgtaaaaaagctgcaagctataatattacacctgcaataatattatttacagcttacgcaaaagtgttgtcgaagtggagtaaccaacaaaacttagcggtaaatacaacagtatttaatagacagcctctccataaacaagttaatgatataataggtgattttacatcgctgattatgttaaaagcgagttttgagaaaaaaatgaacttttgggaggaggcaaaaaaggttcaggttactttcatggaagcgcttgaacatagagactatgatggagttgaatttataagagaatatgctagatataataatttaaagcacaaaagtgcgacaatgccagtagtgttcaccagtatgttatttggaaacatgtttaatcttaataataatgatctattgaatattggtgagttaaaaatggcagtcagccagacatcacaagtttatctggatcatcaagtgatagagctcaatgatggagtcatgcttagttgggactatgtttcagaggcttttgaaaatgatgtaattgagtcaatgtttgaggagtatacccacattattgaccaattaacgtccggtgagatgatgtcttctgaagatacagcactggaacaagcaattactgattataatcaaactgagaaggccatcaagccggatactttatatcacttgtttgcgagacaaacaataaaaacacctgagaatattgcgattgagtgtcaaggaagagcagttacctatcaagagttacaagttatgtccaaccgcatatctagtttattggaagagaagggaattcagccaaatgagtatgttggggttattgttgatcgtgagatcgagacaatcgccagtatcctcgcagtgttaaaaattggagctgcttatatcccaattaatccggaatttccaaaagaaagacaatcatatattgtgaaagatggtaattgtaaagttgtattaacagctgaactggtaaaaactattgtgtcaagctataaagagtctaaaagagaaagtgtggcagtgccggaacaaatagcttatgcgatatacacttcaggaagtacgggaaaacctaaaggtgtaattataaagaatgaggctgtaattaatactatattagacatcaatgaaaaatacagtgtgaatgaaacagaccggtttatcggattatcatctatgtcctttgatttatcaatatatgatatttttggtgctttttctgcaggagcaacattagtaatgatcgaagatcagagagatattaaaaagattcatgacatcgtaaaagaggaaaaaattacagtctggaactccgttcccatgatcatggaaatgttagtaaactatatggatgaaacagaaaacaaatctaacgctggagttattaactatgacgagcttcctgaattaagactggtattattaagcggggattggatacctgttcatcttcctgagaggattaaggatcacttcgttgaaagtgaagtcataagcttaggcggggctactgaagcgtctatttggtcgatttattatccaattaaaacagtcaaggctgaatggaccagcattccttacggttatccattatcaaatcaaacttactatgttttaaactatgaaaatgacccttgtccaatcggagtgaaaggtgaacttttcatagggggaaaaggtgtagcagaaggctatttaaatgataaagaaaaaactgaagcgtcatttattgatcacccagatttcggaagaatttatcgtacgggggatatgggggtcttgacgcaagagggttatattgagtttttgggacggaaagatcatcagattaaagttcgtggatatcgcgtggagttaggtgaaatagaaagtgtaatattagagcaccgacaggtgagaaatgcggtagtcattaatcaaaaggatgccagaaatcaagatgtgttatatgcgtacgtagcggggcaccaatccttaccgccaactgatctgaaagagtttttaagcctgaaagtgccggaatatatgatacctagctatatcgtacagattgaagaggttcctttaacaagtaacggaaaagttgatcgtaaaaaactactggctctagacgttacagatcaagcatcgattggaaggaaaatcaaagagcctcgaacagaaattgagagagatttagttggtatctggaaaagcgttctgaaaacaaatgaaatcagcatagatgacaacttttttgaattaggcggcaattccatattgatcattaatttaattactgctattgaggatcgtttatttattaaattagattttaaaaattttatatccaacagtaccattgagaaactagcaaaagttatcagtgtctctgaaagaaaaagtaaaacaaatagtaatgtgatggaaattcaagctgatatcaagcataaaaatacggaattcgatttaactaacgttcaaatggcttatctaatgggaagagataaacaatttgaacttggtggcacctcaacgcatgcttatttagaaattgagactgagctgaatattgaaaaactcaacaaaagtttacaaaaagtaatagatcatcaagacatgctgcgcgcggtcattcttccgaatggaaggcaaaagattcttcaacaagtccctcagtatgaaatatctgtacaggatattagtcaattaagtgatatagaacaagagaagaaaattgcagaagaaagagacagaacatcacatcatatctttaatccaaatgagtggcctttatttgaattcaaagccttgaaaattcaaggggataaacatagattatttttcgacatcgatatgttaatagctgatggagccagcatccagcttttatttaaacagatatctgaattgtataatggaaaagatgaaatggtaccattggaaataagctatagagattatatgttagcataccaaaaagtcaagaccactcaaaaatatgaaaatgataaagcctattggttaagtcagctcgaagattttccaaaagcacctgcggtgccattaaaagaaagattagatgcaataagcaagccaactttcaaaagaaaatctaaaataattgacaagcttctatgggaaacactttgtaaaaaagctgcaagctataatattacacctgcaataatattatttacagcttacgcaaaagtgttgtcgaagtggagtaaccaacaaaacttagcggtaaatacaacagtatttaatagacagcctctccataaacaagttaatgatataataggtgattttacatcgctgattatgttaaaagcgagttttgagaaaaaaatgaacttttgggaggaggcaaaaaaggttcaggttactttcatggaagcgcttgaacatagagactatgatggagttgaatttataagagaatatgctagatataataatttaaagcacaaaagtgcgacaatgccagtagtgttcaccagtatgttatttggaaacatgtttaatcttaataataatgatctattgaatattggtgagttaaaaatggcagtcagccagacatcacaagtttatctggatcatcaagtgatagagctcaatgatggagtcatgcttagttgggactatgtttcagaggcttttgaaaatgatgtaattgagtcaatgtttgaggagtatacccacattattgaccaattaacgtccggtgagatgatgtcttctgaagatacagcactggaacaagcaattactgattataatcaaactgagaaggccatcaagccggatactttatatcacttgtttgcgagacaaacaataaaaacacctgagaatattgcgattgagtgtcaaggaagagcagttacctatcaagagttacaagttatgtccaaccgcatatctagtttattggaagagaagggaattcagccaaatgagtatgttggggttattgttgatcgtgagatcgagacaatcgccagtatcctcgcagtgttaaaaattggagctgcttatatcccaattaatccggaatttccaaaagaaagacaatcatatattgtgaaagatggtaattgtaaagttgtattaacagctgaactggtaaaaactattgtgtcaagctataaagagtctaaaagagaaagtgtggcagtgccggaacaaatagcttatgcgatatacacttcaggaagtacgggaaaacctaaaggtgtaattataaagaatgaggctgtaattaatactatattagacatcaatgaaaaatacagtgtgaatgaaacagaccggtttatcggattatcatctatgtcctttgatttatcaatatatgatatttttggtgctttttctgcaggagcaacattagtaatgatcgaagatcagagagatattaaaaagattcatgacatcgtaaaagaggaaaaaattacagtctggaactccgttcccatgatcatggaaatgttagtaaactatatggatgaaacagaaaacaaatctaacgctggagttattaactatgacgagcttcctgaattaagactggtattattaagcggggattggatacctgttcatcttcctgagaggattaaggatcacttcgttgaaagtgaagtcataagcttaggcggggctactgaagcgtctatttggtcgatttattatccaattaaaacagtcaaggctgaatggaccagcattccttacggttatccattatcaaatcaaacttactatgttttaaactatgaaaatgatccttgtccaatcggagtgaaaggtgaactttacatagggggaaaaggtgtagcagaaggctatttaaatgataaagaaaaaactgaagcgtcatttattgatcacccagatttcggaagaatttatcgtacgggggatatgggggtcttgacgcaagagggttatattgagtttttgggacggaaagatcatcagattaaagttcgtggatatcgcgtggagttaggtgaaatagaaagtgtaatattagagcaccgacaggtgagaaatgcggtagtcattaatcaaaaggatgccagaaatcaagatgtgttatatgcgtacgtagcggggcaccaatccttaccgccaactgatctgaaagagtttttaagcctgaaagtgccggaatatatgatacctagctatatcgtacagattgaagaggttcctttaacaagtaacggaaaagttgatcgtaaaaaactactggctctagacgttacagatcaagcatcgattggaaggaaaatcaaagagcctcgaacagaaattgagagagatttagttggtatctggaaaagcgttctgaaaacaaatgaaatcagcatagatgacaacttttttgaattaggcggtaattcaatttcactttcaaatatatacactaaaatagaaaaaaaatattcagatttgaatatagttgatttattcaagtatcaaaaaattagtgaattatcacattttattagtgttatgaaagaggagaataagaatttaaaattaaaatcagtaaaattgcctccaaaaattcttgctaatagaaaagataataaaaatgaaaagacaataattttagaaaaacagttaaaaattaagtttaataacttagaagtaagtaataaagtaataaatacatttttatatttatttagcaactttatagaaaacgatgaatattatgtatcccttttaaaatcaagctatatagatttggaaaaaataaatatagaagagtatagtgatttaaccgagtttataaaaaacatagaggaaaataagataaaaagaaagacagtatccaaaataaatttgcgtagcaacctgggtttagagagagataatgctcatattaatgttttaataatagataaacaaaaagtcgaaaataatattagcgaatcttatgaatttatatttagttatttagttaatgataacaatataaatctcgaattaatatttaaaaataataagttgcgggaaatctcagtagaaaagttttttaatacttatataaatattatttctgatttaatataaaagtagaaagagcacctttttcaggtgctctaaaaaggtgagtgatgtttttatgtttaatgtttttgaacaactagataaaaacgaaattaagttcactaaaaaagaaatagaaaccaaagtcgctataattggaataagctcgagattacctaaatcaaataactttagagatttttggggtaatttggttaatggagttgattgtattggagaaatagatagccagagaaaaaaggattgcgattatttttttgagaataaaggtatagatacgaaaaaaataaactatcagcaaatggcttttgtaaacgatgtggataaatttgattacaaatattttaatattccttatcaagaagcatctttgatggaccctcgtcaaagattatttttagagtcaagtattcatgcattattggatgcaggatacccagaaaaaaaagttaacggaagtaatattggtgtatacgttggtagcagtaatagtgattcaatatataattatgataaggttatatatgattcatctattcgaaatcctgtaagtattgttaataatcttccttcaatgattgctagtcgggtttcttattatttagatttaaaaggacctagtatgactctagatacttcttgttcctcctctcttgtagcagttcacgaagcatgtaaagctataattcataatgaatgtgagatggctattgcagggggatgtaacttaaatcttattcctcttcagcatgaagtaaggctcggcattgaatcgagtacttttagaacgagggcttatgacaatgactcagatggaacaggatttggagaaggtattattacatttattttaaaacctttattcagtgctttaagagataatgataacatttattctgtgatagaaggaagtagtgtaagtaatcaagggttttcttttggggttgctactccaagcattgaaggacaggaaaaccttatttcggaaaatattagcaagtccaatatagatatcaatgacatttcgtttatagaagggcatggaacaggaactgcaattggagatgtaatagagatagaagcaatcaatcgtgctttctccgaaattaacaaaaaaaattatttgcctatggggtctgtaaaaaataatataggtcatttattaagtgcatccggagctgctggattattaaaaagcgtgcttgcattaaaaaatcaaatgtttcccccaacgataaattataatactcctaataaaaatatagattttagtaactcacctgtgtttattaatactgagaaagtagagttacataaaaaagaattgctgttaggatgtataagttcttttggtatgagcggaactaattgccatatgattatttctaattacgacaaaaaaagaactattccaaatgaggattgtttagagcctcaaatattcacattttctgcaaacgatttggatactttaacttttctattaagtgatttatataattttcttcttgaagagaatctgatgctactaagtgatattggatatacattgaattgcagaagagatcatttagcaaatagagtggctataatagcatcatgtaaggaagatttattagaaaaattaaaagaagcattaaataagattcaacaaggaaataaaattattaaagatagtgaaatttattttaacgttaatgatataacctctaatgtaaaagaattgtctttaggagatgagtctcaagacgatttaaggcaaatttgcagaaggtatattatgggcggtgaaataagttgggacatgtattataaagaatataatcaagttgtttctttgcctgttttcacctttaagaaaactcggtgctggtatagtgaagaaaaaatagactttgtcttaaatgacgatgttattttaaatgaaaaagaaaaaattgtagttgaaacatgggcaaaactatttggcctaaataaaatagacttttctcaagatatttaccaagtaggtggagattccttgagcttggtaagtatgtatcatgaaatagagtcgaaaatacccaatatttcattagaagtgtttatagaaaaagaaacattaaatgaaattctagattacgttaatgaagcatcacaaaaaaataatgaaacagatgaattaatttttgaaaagaataattgtaaagtttataaattctcgaatggaataaataattcaaacacgtatttaatttgtaatcgtcataagagtatccttattgattctggagttagtttagaatatttaacagagttctgtgaaagattgaaattgaatcgaatagattatattgttcttacacatgctcactttgatcatacttattctgcaaatgaaataaaagaaaaattcaattgtaatttcataattcatgaaagagaaataaattttgcgagagatatcataaataatggacttgcccttcttgggaaaagttttacgtttgaaagcgatgatatcctaattaaagataaatatacagttttaaacattggagatattagcctcaagataattctcagtccgggtcatacaacaggtagcgtatgcgtgctttatgacaattttttatttacaggtgatactatttttaaagataaaaaagcaaaacccgataaaaaaacaggaaatgaagattatttaaagaaatccatttcttatttaattaataatactgaagataatactataatatgccctggtcatgaagatattacaacaatttcatttgtgaaaaaaagaatttatgatttttgattttattttatgaggtgtttagatgtgaagttggtgattagtgacagtgtttcggatttttttgataagatttcttctctgcttttcttaaaacacgaaggattcttcaaagattatagcattaaaatgggtataaaattagataatgaatattttgtattactagatgatcttaaaagaataaaagagttagatagtgagtttttaaatttttattttggcagcttttgcgactacaaagatgttaggaatgcaaatattttttgtttagccacaaccttttttaaaataccacaaatttatacgaaagatttttttgaaattattgattatttgtctgcagttacagaagaagagataagaaaaaatattttagagtctctaatttatttacaaggagatcttaaaactgaaacatctacccaacagtatttaaatgatagggaaagtttatttgagctacttaataatctaaatatcaagcccgaatacaagtggatcatatttaaggtaatgaaatctcctaaaacttatgtagatcaattttgcaataaattaatgttggtgaatggttatcttaacgaggcgatttataatttaattaaatttagagatgagtggatgaatcaattaaaaaacataaatatggattttccaaaaaagataatcagtacgttaaaaggtaaggaatacttatcttgtaattatattaatatatatccaacacttttaccttacactgcaactattacgaaaagtgaagataacatttatgttggactggggtataaagttgatgaaatttttgaaaatacattggagaaagcagagattaatcacatcattgattttttgaagcttttatcggataaaagtaagttcaagatattaatcttacttagtcataaaaaaatgtatgctaatgagattgctgaacagctaaatttaaccaacgcaacgatttcacaccatatgagaattttgacattgcaaggtttagttgagagtgcgagaaatcaaaataaaacatactattatcttaattcttctaaatttcattctcttctaaatggattattagggaaatttaagtctgctttaattttagagaaagaggagtaaaattaagtgtataaaacagtttatgattttatagttgatgctgaaaatcgagatgataaaggaattacatttataaatggatccgataatgaagtatatatttcttatgctcaattatttgaaaaatccagaaaagtattaggtgttttacaaaaaaagggtttaagaaagaaagatgaactaattatacaaattgaggataatgaacaatttattaaagttttttgggcgtgcatattaggtggaatcatacctattcctttaagtgtggggtataatgaagagcataaacaaaaaatacttcgtatatggagtattcttaataatccttattgtatttctgatcaaagaacattacattcacttgagaaagttgcggatgcagaaacttattcatcaattgtaaaacaatcaatttatttagatgaaattaagaattctaatgaagtgggtgaattaatttcccctaaaccagaagaaattgcttttattcaattctcttctggtacaactggagatcctaaaggtgtaatattaacacataaaaatcttattaccaatatatcagcattaaatgaggcttgggagacatcgaaatccgattcctcactaagctggatgcctttaactcatgatatgggcctcattgctattcacttagcatcaacgtataaaaaaattcaacaatatataattccaacctccgtttttatccgaagaccgactttgtggttattgaaaacacatcaacaccgtgttacacaattatactcccctaactttggatataagtttttgttggataactataaaaaaaatcaaatctataactgggatttaacttgtgttagattattagctaatggagcagaaccaatttctacttctttgtgccagagatttttagaagaaatgaaacaattcggattaaaatatgaaaccttaaatactgtatatggtttagctgaggctacagttgctgttagtgtcccaaaattaggaaacccttttgttcctgtaacccttaatagggaagctttagaagtaggtcaaaaaattcaaaaaactgttgaagaaaaaaagggattaacttttgttgaagttggcccggctgtacgtcattgttctttccgtatatgtgattctaataattacgttctggatgatgattttataggtcatgtgcaaataaagggggaaaacgtaacgtctgggtattacaataatgaatctgctaccaaagacgctataactgcagatggatggttaaatacaggagaccttgggtttatacataataatagtttggttattaccggaagaacaaaggatatcattataaagaatggccaaaattattattcacatgatatagagagagtagcagagaatgtaaaggatattgaattaggtaatgttgtggcatgcggggtcccgaatgaaacaaaggcggaagaagatcttgtgatatttgtaaaatgtaagcaaagttacgatattacaacagcagagaaggaattgaaaagagaattaacaaaacaattgggtttgaatgtacatcaagttatacctgttaggaaaattttcaaaactacaagcggtaaagtgcaacgttctaaaatgaaggatttttataaagagttaattctgtcttgattaagttttacatttaatcgtattttataccatctctgtcttgtgtatgaattacctgatatttcttgtgagaatttatttggaataagaaatactattgatatgacattatcaataggaggactgtttaatggcaacaagacaatcagtagatgaacatctccaaagaagcgaacaggcgtatgaatttgcgaatgagcaatttatgaccgcttcaaaacaagagcattataatgataatgagtacagtgaagcgcaaatgatgcttgaaaacgcggtgaatgaattaaacaagctgtcattatctgcgaatgatcagcaaagagagcagctttatcgaatgagattgcagctgcagaccttgcaaaacaatatgattttgcagcgtaattttgattactgaccgcgccgtttcaaatggttcagcaaacctgccggaatcccggcgggtttttttgtatttttttaaaaaaagaattgacaatagggcggagtgtgtttattgtattacgtgtactacttgatgtaatacacataaaacactcaaaaaatgaaatcgacatataaatgttaagcatagggaaggggaactttcatgaaaaacaaaagatccgtaaaacaagatgtgcctcttattatcgccgcctcggttttggcaagcagtctgtttgtcgttcttgtcatcatcggttttcaatggcagaacatttaaagaaagagagcagctcgtaaaagaaagaagggaagtaaatgattcaaatcgatccgagaagctcaactccgatttatgagcagattatacagcaactgaaagagctttgtttaaaagggatcatgaagccgggggataaacttccttctgtcagggaattggcaacgatcattatcgccaatccgaacacagtcagcaaagcgtacaaggagctcgaacgcgatggtgtcattgaaacgctgaggggaagaggaacgtatatatcggagaatgcaaaaacgacattggttgaagggaagatgacgatgataaaagagcaattgaaacagctcatcatcgatgcccattacgcgggagttgagctggagaagctgcaggaatggataaaggaaatcagcgctgatgtgaaaggaggcaaggatcatgattgaattgcggaatctctcaaaaacgatagacggtaaagaagtgctcaaggatatttcgctcaccatcggaaaaggggaaattttcgggctgctcgggcgaaacggatcagggaaaacaacactgctccggctcattcagcagattctgctgccggatcaagggacggttttatttaatcaggtggaaataaagcggcatccgaaagtaaaacagaacatcatttatatgcctgttgaaaatcctttttatgacaagtatacatataaacagcttgttgcaattgtaagcagaatctatccgaattttgatgtgacttacgccaatgagctgatgaacaggtacggcattccggaaacgaagaaataccgtgaattatcgacaggcctgaaaaaacagcttgcgctcgtccttgcctttgcttcacgcccggctcttatccttttggatgaaccgacggacggaattgacgccgtaacgcgtcatgacgtgctgcagcttatggtggatgaagtggctgaacgggaaacgagcattctgattacctcacaccgtttagaagatattgagcgaatgtgcaaccggatcgggtttttggaaggaaatcagctgacgaatgtgatggacttggatgatatgaaggaagagtacatgaaaatccaaatggcatttgaagaggacgtcgccttgaagatcagagaacaaaacataccgattctcgaccatgccggtgtgttttatacggtgctgattcaaaagaacgatgagaagaaaaagaactttctgcaagagctgcggccgaaagtatggaatgaacttcctgtgaacttagaagaggtcttcatcgcgaagtttggagggaaccggagatggtagacaggggattgctgtacagggaatgggtgcagaatcgaactgttcttgtgatggtcggcatttttttagcggcggtcaatccatttgaagtgttaaatacctatctggtttatcaaggctgtctggacacccacggagcatattgtaagttttatgtgaattctttggatagcggaatgctgaacttgaactgggcgcccgctgtcatcttagcggtttgcttattcggactggaacgtacgaaaggaacgattgatgcgcttttcagtctgccttattcccgcgctcaggtgtttcacactaaattttggctcggggcggcggtcattaccggcgctcaggtgatcggctacgggctggctgagctgctcattcttctgttaaagcctgagcgcgtatatttcttccaccattacagcgtcggagagattattgtgagtattttggcttttgcattggtcgcgagtgcaggctgcttaacgggcaatacgttcgcccagctgttaacggcgtttactgtgtcgatagcgccttacctgattattacgctgccgctgtccaatgtagaagtcatcttcggagtcagcatgtatgagctgatgccgtcagtcgaggcttatctcaaagtaaacaatctttttcaatacttgattccgatcatgtacatagatacagattgggtatctgccagcaagtatatattaatcatcccggcagtgatgagcattgtattttatgccatcgggtacttttgctatgtcagacagccggcggaacggaacggccgtttttttctctggagacagcttgaccggcccattcagattgtggtgattataatcgccgttctcggttttggcctggcggggtactcgacgggacagacgatgacagggtatgtggccgggatgctggtcggaggagcgatcggatttttggtcagttattttgccatatataaaaaaacgaagcatgtgtaagagaggaggaccggaatgataccgcggggattgttgtacacagaatggaagaaaaatcagtggttgtttttatgcagcggcattcttttaatggcggcaaacccttttttggtttataacaactactcaacatatcaagaatgtatgaataaccaagctcttcaagattgtgaattcgttgtcaattatacgaatgggtcgcctctttccttcagctggattgtaagtgtcatcattgccgtcttcttattaggcttggaacggacaaagggaacgatggatgctttgttaagcatgccttacagcagaggccaaatctttcagacgaaattctggctcggcggggcagtcattgttgttcctcaggtgataggctatggagcggcgtcattgctgatatctttgctgaaaccgagccatacgtacgattttgatcatttttcaatcggaatgattgtcatcagttttatggcttacgccttgttaatggcatccggcgcattaacgggacagatattcgcccagctgttaacggcgtttaccgtcacggtactgccctttttactcatcggtctgccggccgcgaatttggaggttgttttcgattttagtgtgggagatcaattttcttttatcagcagttatatcgaatcccgtctttttatatttgtaacccctattggatatgtgtttaacgactggatcagagaaagggatttggttttaatcattccgattgtgatgagccttgtcttttatctgatcggttatgtcagctttctgaaacacccgaatgaacggaacggcagattctttctttggagaaaattggaccgtccggtgcaaatcttggtgattgcctttgctgttatgggtttcggcgttttcggatatggggtcacagacacgatgttcggctatttagccggcattatcttcggtgcggttatcgggtttttcatcagttattttacggtttacaggaagtcaaagcatatgtagatctgtttgaaaatgaacagtttggaggaaggcaaggtgccgattagcggtttgctttataaagaatggaagcagcggcagacgctgctgctccttacagcggggttcttagctattttaggccctttggcaattataaatgagtattttcactataaggattgtttgagtgcgcttcatcaatattcaggttcagtttgtacgttcagcattgattacagcaatcggaatttgattgggcttcatttcattcctccggttatgatggggctttttctgataagaggaggccgggctgaaaggatgtttacactgagtcttccgtattcaagaagccggatatttcatacgaagtttttcttgggagcagccgtgttagccggctcgcaatttgtttcttacggagtatctgacatattgtttctagcgcttaaacctgacgctgtccatcattttcaatcattcagcgcagggatgctggtcatcagcttgatgatttatgcattagtgacagctgccggcacgataacgggcaatttagcggcgcagctgatcacagcgttcacggtttccgtctttccgatcgtggttatgacgatttacctgttaaacgctgagttcctttttggcaggcaggctgtgccggatattgatttcccttggagcggatttctgatctatttcatgcctgccgcttacttccatacatcatggatgtattacatgaaacacgcattgttaatctccgcattaatgggattttgtttctatctattcggctatgtgaatttcctgaaaatgccgagtgaacgaagcggacattttatcctaagcaaacacattgaacgcaccattcaagtgctcgtcatggtgctcagtatgctgggaagtgcgggggtatgcggatatgcttataacggttcgtataccggttacatattcggcatgcttatcggcgcggttatcgggtttttcatcagttattacttcatctataaaaaaacgaaacagatataagggggagtggtgtacgtgatagaagtacagcatattgatcattcatttaaaatcggcaggaaaggcagagagagtgaggttccggtattgaaggatgtctctttgaccgttgaaaaaggggaaattgcctgtatcgtcggtcggagcggttccggaaaatcaacgcttctgaatttaatatccggatacatagcgccgacgaagggccgtatcgtcattaacggcactgatgtgacgggcttcagtgaaaaagagtgggcgcagttccgcctcgggcatttcggctttatttttcaaagttttcagctcattccgagtctgacaacctatgaaaatgttgaaatgccgcttgccttaaaaggcgtcaaaccgtctgaacgcaagcagaaagtcgcggacatgctgaaacgggtcggacttgagaatcatgcgaatcattatccgaatgagctgtcaggcggccagcagcagcgtgtcagtatcgcaagagccctgattttaaatccgtcaattattttagctgatgagccgacgggaagccttgattcagaaacggaacttgaggtgcttgcattaattcagcagctgaaccgggagcgcgggattacatttgtcatcattacgcatgacgatgaagtcgcttcgatcgcgcattcaaaattccagctgcatgacggtgtattaaaagggggcgttactgttgagatttaaggatcagattcactttatcagaagaaatatgaagaaaaaccggctgcgtgttttcatgacggtgctggcgacgacaatggcgtgcgcgtttttagtggtgctggcttccgtcggattcggcatccaaaaaacgattacagacattacgatgagccagcagattgttacggaaatcaatgtgctcggccaagagaacggaaaagccgtgaagaaatcagacttggaaaagtataaaaatgtcaagtctgtcgttgaaagaacacaagtgtatgaaccgaacaaagcgtcattgggaaaccgaacaaatgaagattcagccattgtgctgacaaacatgaacgatgaagtcaaagccaatatggagcttgatcagggaagagtcgcccgtacagagaatgaaatcgtggtcggctatgattttgcgaagaacctattgacgaaaaaagaggctgacgcttacgacaaagagttaaatgatcaccaaggcgacatgtcggaggtgaaaaaaccaaaaggctatacgaaagacctgcttaataaaacgatacagctgagcatctccaaaacaaacaaagacggagacgttgagaaaacgaaaacgtacgactttaaagtagtcggaattacaaaaaaaccgtcccaagattggatggaggatacaaatatttttgtgagtgatcaattcaagaaagacttctcaacattcttggatctgaagaatggaaatgcggaaaaaagcatcaatgtgtatgcggacaaattcgatcatgtcgatcagcttacccatgacctcacgaatgacggcttttatgtcagatctgtcactaccgagctgaagggcgtcaacacctttttccttgtctttaaaatcggcctgatctttgtcggctttatcgccgtcgtgatttctgccatcggtattttcaatacgatgacgatggcggtgacggaacgaacgcaggaaatcgggattatgaaagcaattggcgcaagcccgtccatcatccgcagaatgttcctgatggaaagcgcctatatcgggatattaggttctgtcatcgggattatcatttcttacggagtgagttttgccgtcaatctggctgtgccggttattttgaaagcggtagggggaaacaccggagccgaagatcttcattataccttctcctatatcccgctcagcctcgttgtgatcgcagttgtcatttgtgcgggggtcgcggtgatttccggtatgaatccggcccgcaaagcgacaaaaaccaacgttctgactgcattaagaagagaactgtaaaggaaaaaagccggctggacatcagccggtttttcctctatctatcagaaaagggcggataccatgtttcacattttgttaatagaagatgataacactttgtttcatgagatgaaagagagattaacgggctggtcatttgcggtgcacggaataaaagatttcagccgggtcatccgggagtttaccgaaatcaagcctgatttggtgatcattgatgtacagctgccgaaatttgacggctttcattggtgcagaatgatacgttcccaatcaaacgtgccgatactctttttgtcctcgcgcgatcatcccgcggatatggtcatgtcgatgcagctcggggcagatgattttattcagaagccttttcactttgatgtgttaatcgcgaaaatacaggcggtgttccgccgtgtgcatcaatacggcacagaaccggcgctgatgaaaagatggtgcggggcggtcattgacacagaaaccaacacggtcagccgtaaaaacggttcggtcgagctgaccaaaaacgaaatgctgatcttaaaactgctggctgagcagaaaaataaaatcgtcagccgggaagaactcatcagaagcctatggaatgatgagcgtttcgtcagtgataatacgctgacggtgaatgtcaaccggctgcggaaaaaactcgatcaattaggcatcgggaaaatgattgaaaccaaggtggggcagggatacatcgcaaaggaagaagacggtctttatgattaaatcatttctgctcgaaagaaagagctggatcgcgatgtttcttttgcagcaggctgtgcttctttttgcggcatatattgatccgtctattccgtttttttcggtgctgtatttcgtttacctgtctcttcttgtgtttcttgtatttctcttgttccgctatcgtaaagagaccgcctattataaaagcttaagagagtgggacgccaatttagacatgtcttatcttaaagcgcctgacagtccgtttgagtctatcgttgaagaaagcattgaagggcagacagagcagttaagaaaaagctcacttcaccttcaggcggcgtcagagcatgaaaaggacgatctgatgtcatggattcacgaggtcaaaacaccgctgacagcgatgcatctcatgatcgagcgccttgatgaacagccgctgaaagcccctttgctgtatgaatggctgcggattcaccatctcctggaccagcagcttcatcagaaacgattgtcctttattgaaaatgatttatcattccagcgaattcagctcagaccgctcgttttcaaagaaattaaaaatctgcaatcatggtgtatacaaaaagggatcgggtttgacattcagcttgattcaccagacgttcacagtgacggaaaatggctttccttcatcatcaggcagctgttaagcaatgccgtcaaatacagtgaggcggatgacattaccgtaaaaagctatgaacaaaacggccgggtgcatgtggatatcgaagaccgcggcatcggcatcgagcccaaagatcttccgcgcatttttgaaaagggatttacctcgacgcgaatgaggcgtgatcacgcgtcaacggggatgggcctgtatttggctcgaaaagccgcggctccgcttcttatccagatcagcgtgcgctctgagccggaaagcggcacggtttttaccttggtgtttccgaaacagaacgatgccgtcagcatgttcagcgtgtgacaaaagtgtcacatgcttttctcttttgttcgcttaatcaaacgaaaaaaacggcttctgtttttaaaataaagataaccaatgtaaaaggagaatcagaacgtgatgattttagaagcaggcaatatccaaaaaagctacggaaacaagctgaataaacaagaggtgctgaaaggaattgatcttcagattcacaaaggggaattcgtcagcattatgggcccgtcgggatcagggaaaacgacccttttgaatgtgctttcctccattgataaagtgagcgcgggcaccattaaactgaatgagacggagattacatccatgaaagaaaagcagcttgccgaattcagaaaacggcatctcggctttatttttcaggattataatttattggacaccctgaccgtgaaggaaaacatacttctgccgttatccattacgaaaatgtctaagaaagaggcggacctgcgatttgccgagacggcagaggagcttgggatctatgatttgagacataagtatccgagtgaaatttccggcgggcaaaaacagcggacgtctgccgcaagagctgttattcacgagccgggcattatttttgctgatgagccgaccggagcgctcgattcaaaggctgccacggatttactgaataaactcagccgtctgaatcaaaaacgccgcgccaccattgtgatggtgacgcatgatccggttgccgccagctattccggacgtgtggttttcattaaagacggccgtgtgtatacacagctgaataaaggcggtcaggacagaccggacttttttcaggatattatgaaaacgcaaagtgtattgggcggggttcaggcatgagtattcatcatttgatcttccagaacctgaaaaagaatatgaaaaactattacctttacgtttttgcgctggtgttcagcgccgccctttatttcgcgtttgtcacgatgcaatacgatccggcgcttgatgaaatgaaaagctccataaaaggagcggcggcaatccgggccgcctctgtactgcttgtggcgatcgtgtcggtatttcttttatacgccaacaccatttttattaaacggcgcggccgggaaatcggcttattccgattaatcggcatgacgaaaatgcacattttccgcatactcagcacagaaaatttcattttgtatttcggatcgatttggatcggtatttttgccggcttttctctctcgaaattatgtatgatgatgctgtttcatacagtcggtgtgaaagcctctgtctcactgtttttttcaagcaaggcgctcgttcagacgttaattgtgttcggggcgatttacgtgctgattatgatgatgaattacttatttattaaacggcaaagcattttgtctttatttaaaaccgcgtcatcgtcagaaagcggcataagacggctttcttgggtgcagatgtcgatcggtgttgtcggtattgcggccattatcgccggctatgccgtgtccgcggatttattcggaggcagttttacgagcatgaatgaactgttttcggccatggtgtttattctcggctcggtcattatcggaacctatctgttttataaaggttcggtcagctttctggcaaatctcatccggaaatcaaaaggcgggtatctgaatgtcagtgaagtgctgtctttgtcatccatcatgttccggatgaagtcaaacgccgtcctgctgacgattattacgactctttcggcgctggcaatcggtttgctgtctttaagctatatctcgtactattccgcggaaaaatcggctgagcaaaatacagccgcggactttgcgtttgataaccaaaaggagactgactcatttaccgctttattgaagaaaaatggaattgaacacaaagtgaaaacaatcaagaccattcaagccggtgtcaatatgaagaacatcataaacggcgacatgaaaagctttcaacaagacccgtccagcttggcgctgccgattataagcgagaaagacgcagaagggacggagctttctgacggagaagccgtgtttaccggatataatgatatgatgaaaagatttctcgacctgaaaacgtcaggttccattgatataaacggcaaaacggataaaataccgctggcgtataagggcttgaagaacgacttccttctgtcatatacatttacaagcggagggctgccgaccgttatcgtcacgcagcaggtatttgaccggatcgagaaagatatcgacccgtccattcagggaaaatcaaatcggtttttcggcattacactcaaacgtgaagaggacatccaaaaagctgatggtctgtttcaggcgcagcactattctgacggcgcgctttcacaatttgaaacggctgacacccaaaagaaaaacatggggctgatcatgtttattgtcggctttttggggttaacctttctgatcacctcaggctgtatcctttattttaaacaaatgggcgagtgtgaggatgagaaggctgattacacgatattgcggaagctcggcttcacaacgggggatctgctgaaaggcatccgccggaagcaggcgtatcatttcgggattccgctcgttctcgggctgttccacagctattttgccgttcagtcaggatggtttttattcggaacggaagtgtggacgccgatgatcatcgtcatggcgctgtatacgctgctgtactccatcttcggcatgctgtcggtgctatactataaaaaggtcattcaatccgcattgtaaaacaagttgaggagcctccgcataagcggaggctttttttgtatgaatagaagaaagcgatttttaaaagaatagacatacgtcattttctcgcgcgggggagccttatgcagaagtattttcaattgaaatctgaaacaggagcctttcatcttttttccaaggaacacattttcacgcttttggtcatcggattgcttggggtgtgcgtgatcatattccggaaacagctcaatcacggccggccgaatcgcgttttccgctatgtactgttcattctccttgccgtgtcgcagatcagctatcatatatggctgctttgtcatcatgcctggtcgctgaaaacagctctgccgctgcagctgagcgacctttccgtctatttggcaatgctgatggtcatgacaaaaagcaaaaaactgttcgccttcctctattttgccggtttgggcagcgccgtacaggcgatggcaacacctgatttaggggcgtattctttccctcattttcggtacatcgtgtttttcgtctcccacggctgtgtttttcttacctgcctattcatggccgcttcagaaaggtacagaccgtcggcgcgcggactgtgggtgtctgtgctgatcgtaaatctgtacggggcgtgtgtcttttttattgatcgtgtgctgaatgcgaattacttatatttaatgaaaaaaccgaagaccgcttcgcttctgaacgttttcggaccttggccgtggtatcttctatcaatggaagcggcggtgatattgagctttttcattctgtatattccgttttggctgctgcggaaaagagcatgaggccggcctgtttttgtgaatccaatcatttgtaattttttcaacattccggcattatttttttcagattctgatgttgaaaaaagacgtccgcggcgatagaatgaatgtgctatgataacgtgttcgatacggagccgcggcttgcggtttccgttttttcatggggttttttatagagagagggggatcggtatgccgcgcgctttgaagatattaatcatcggaatgtttatcaatgtgacgggcgcatcttttttgtggccgctgaatacgatctatattcataatcatttagggaaatcgctgactgttgcgggggttgttctgatgctgaattccggggccagtgtggcggggaatttatgcggcggatttttgtttgataaaatcggcggattcaaatccattatgctgggcattatgatcacattggcaagtcttctcggactcgttctgtttcatcaatggcccgtttatatttggctgctcatcattgtcggcttcggttccggtatcgtgtttccggccagttacgccatggcgggagcggtatggaaagaaggcgggcggagagcttttaatgcgatttatgtagctcagaacgcaggtgtcgccgtgggctcggcactcggcgggatggttgcggcgtactcgtttacgtacgtgtttttagccaatgctatgctgtatgtgctgtttttccttatcgtatttttcgggtttcgaaatatcaaaacccaaaatgcgagccaggtttctgttctggactacgagcctgtcagcagcagaacgaaatttacggcgcttctcatattgagcggcgggtatgttctcgggtggatcgcctattcgcagtggtccacaaccgttgcgtcacatactcaaagcatcggtatgccgctttcattatacagtgtgctctggaccgtaaacggaatattaattgtcgccggacagcctctcatgggagctgttctgaaaaaatggtccggtgcgttaaaaacgcagatggtcatcggcttttgtatttttatcgtctcgttcggcgtgcttctcagcgccaagcaatttccgatgtacctcaccgcaatggtgattttaaccgtcggagaaatgcttgtctggcctgccgtgcctaccattgccaatcagcttgcgcctaaggggaaagaaggattttaccaaggattcgtcaacagtgcggcgacgggcggcagaatgatcgggccgctccttggcggcgtgctggttgatcagtacggaatgagcgtgctgctgttgatcctgatggtgcttcttgttgtcagcatcgcagcgacggtgctgtacgacaaacgcctgaaaaccgttaataaacaaaacgtccaagtgcgatgacgacataaaaaaatcccgctgtttcggcgggatttttttgtttatacgaccggaagcacgttgaccgcgtccttaacgtttaaatacgtctttaatgaagaaaagctggcatcaagctgattcattctcatggcgagggtaggcttgatcccggtgataatcaattccgtgccgattaatttaagcaggtggtgcaatttgaaaatccggtctgcggtctgttcgtttacctcggccagacctgataagtctataattaagtaatcatctttagatgcggttaatatgtccgtcaaagttgtcacaattgaatcaaatcgttcttccgttaagtttcccactaacggcaaggcggagatgccgtttcggatcggaacaatcggtgtagacagcgtcgtgatttctgtgagggaatcctcaaggagcttttcgtattctttctgctctgtaatgtctttttgaaaaccgacaaaatagagcttgtcttcaacataaagaggatcaatgttgagttcattccaaaacggggtgccgtcttttttgacatttttcagccgcaccgtgatcttttctttctgggttaagctctttctgattttcgcgacttgttgacggtcggtttctttgctttgcagaaatctgcagttcttacctaatatctcttcggaagagtagcctgtcatatccataaatccctgatttgtatatatgatgggattgtcctcaagagaggggtctgtaatcaccacgccgatgcgtgcgtgatcaagcgcctttttgataagctccagctgctccagttttccgaatacatttgagtcagccatgtaaaacccccttttggccgtaaagctgcgcgctttttcagccattgtttctcccctttttaaatgaatctacagtaaccgtagcataacatatgttctgattcaagcagccgaagtttgcaatttgtcattcgggcttgtcctcatatacactgaatatataaggggaaggcacatcatcgctaagtaagtgactaggtcattgtcactgggtgaaaaatgaatctaatgcatcaagcttaccgatcatgtgttcacatataatggaagaaacaagctttttactttcctgctcaatcgccggtatgtagatatcgaaaatcatcgtattcgtaagggggctggatggcctgaagtcgctttactaaataagggctttaggaaggtgatgaagatgctgcatcaggtaataattgcttgtgtaattggaggaatcatgggggttctcggtcatgtgaaaaagagaggcaggctggagaaacccagaatgacaaagcggtttatctatctcggttttttggaagatggttttatcggaatggctgcttccatcttacttgtcttatccgctgaccccgattcaggaattcaactcgtcatcttatccataatcgcaggctacggcggagaagctgttctcaggagctttgattttgtcagagaacaaaacagtaattcggccgaagcaaaaccacaccagcaaaaaaatcctccatcaaaataatatccccgctcatgacccgttccgggtacattcccattgtatacaaacctgcttgcacttatgaacagaattctataaaatacaggtaagattacggtagcgataagaacagtgaagaggagcagtaagaagcagattttgcaatcagagagttgacggccggtgcaagtcaatcaagtctgtttccgaactcgcctcagagttgcagcggcaaaaccgctgacgcataactgcgttaaaagtatcaagtgagtgcggctcaaaaccgtgctaacgagggtggtaccgcgggaaataaaaatctctcgtccctttttgggatgagggagtttttttagttttagaataatctgaatataatctttctcatcccgtcaatacttggactacatacgccgtattcaatcagaaggaggtttttacgttgagttttcagcacgaaaaaatagaaaagaaatggcagaattactggttggatcataaaacgttcgccgtcagtgaagagaatgacaagccgaagttttacgcgcttgacatgttcccgtatccttcaggagccggccttcatgtcggacatccggaaggctatacggcaaccgatatcctttcgcgcatgagacgcatgcaaggatacaatgtgcttcatccgatgggatgggacgcgttcgggcttcctgccgagcaatacgcgcttgacacggggaatgatccggctgagttcacaaaacaaaatatagataatttccgccgccagattcaatcgctcggattttcatatgattgggatcgtgaaatcaatacgactgatccggactattacaagtggacgcagtggatcttcaccaagctgtacgaaaaagggctcgcttacgtagacgaagtgccggtcaactggtgcccggcgctcggaacggtgcttgcgaacgaagaggtcattgacggcaaaagcgagcggggcggccatccggttgaacgccgtccgatgagacaatggatgctgaaaatcaccgcttatgcggacaggcttcttgaagatttagaagaccttgactggccagaaagcattaaagacatgcagcgcaactggatcggacgctcagaaggcgcaaacgtgcatttcgcgatcgacggcactgatgacacgtttaccgtgtttacgacaagaccggacacgctgttcggcgcggcttatgccgtactggctcctgagcatgagcttgtggaggccatcacgacgcctgaacaaaaagaagcggtagacgcttatgttaaagaagttcaggcgaaaagtgacctggaacggacggatcttgcgaaaacaaaaacgggcgtcttcacgggcgcatatgccgtaaaccctgcaaatggggaaaagctgccgatctggatagcggattatgtcctcgcctcttacggaacaggcgctgtaatggccgtgccggcgcatgatgaacgtgattttgaattcgcaaaagtgttcagcctgcctgtcaaagaagtcgtaaaaggcggaaatacggaagaagaagcgtacacgggggacggagagcatgtcaattccggctttctgaacggactgaataaagcggaagcgattgaacaaatgatcgcctggcttgaagaaacgaaaaacggtgagaaaaaagtgacataccgtctgcgtgattggctgttcagccgccagcgctattggggcgagccgattccggtcattcattgggaagatggcacgtcaacagccgttccggcggaagagctgccgctgattctgccgaaaaccgatgagatcaaaccgagcggaacaggtgaatcaccgcttgccaacattaaagagtgggtggaagtcactgatcctgtaacgggcaaaaaaggcagaagagaaacgaacacgatgccgcaatgggcgggaagctgctggtatttcctccgctttatcgacccgaaaaatccggatcagctcgcttcacctgagaaactggataaatggctgcccgttgatatttacattggaggagcggagcatgccgtgcttcaccttctgtacgcgcgtttctggcataaattcctctacgatatcggtgtcgtgccgacgaaagaaccgttccaaaagctgtataaccaaggaatgattctcggggaaaataatgaaaaaatgagtaaatcccgcggaaacgtcgtcaatccggatgaaattgtggcgtctcacggagcagatacgctccgcctgtacgaaatgtttatggggccgcttgatgcatctatcgcctggtctgaatcaggtcttgacggagcgcgccgcttccttgaccgcgtatggcgtttgtttatcgaggaaaacgacgagctgacgggcaaagtgacagaaggcgcgggcgaaactcttgagcgcgtctatcatgaaacggtcatgaaagtgacagaaaacttcgaagcccttcgttttaatacgggcatttctcagctgatggtcttcattaatgaagcttacaaagcgaatgaactgccgagagaatatatcgaaggttttgtgaagctgctttctcctattgcgccgcatttggcggaagaactgtgggaaaaactcggccacgaaggttcgattgcatacgaggcttggcctgcttatgacgaatcaaaactggtggacgatgaagtggaaatcgtcgtccagctgaacggaaaagtaaaagcgaaattaatggttccggctgatgctgataaagcagcgttggaacagctcgcacaagctgacgaaaaagtaaaagagcagcttgaaggaaaaacgatccgaaaaatcattgccgtaccgggcaagcttgtcaatatcgtggcaaactgaccgggcgaagcccctctcctacagagaggggcttttttatcagcctctatcatagaaattgcacagcgggctttggtatacttaacaccataaagatgaatgggagtgtcacacattgaaaataaatgaaatcagcacagccgtactggaagaaaaattaaaagcgggagaagagctgtatctgattgatgtcagagaagacgaagaagttgccgaaggaatgattccggaggccgttcacatccgcatgggggacatccctgagaagatggatgcgttagacaaggacaaggaatatgtatttatctgccgttccggaaaaagaagcatgaacgtttgtatgtatttacatgagcagggcttccgtacggttaatgttgaaggcggcatgctggagtgggaaggcgaaacaaagccgaagaaataacgctttgaagtgaaagaagaaaagggacgtgcgtctttttcttctttttttataaaaaaacgggaggcgaatcaggtgaaaccgatgatccgcgcgatgaaaacaaacgatatcaaacaggtccggcaagtcgcagaacgaagctggcatcatacgtatgaagggattattcccagacacattcaagatcagtttctcgaatccgcctatcaggatgagatgatggaacgccggctcttgcattctctgttctttgtggcagaagaagaggggcgagtgctcggttttgcaaatgccaccccggttcaaaaagacggaaatgcggagctgaccgccatctatattgacccggattgccagggaagcgggataggcacggcactccttaaagaaagcatcaggcagtccggcggggtaaaaaagctttatgtccatgcagaaaaagagaaccgcattgccttatccttttatcaagcgaaagggtttcaatgggtatgtgaatttgaagaagattttaaaggacacactttacagacggtcaaactggtactgaacatataaaagcgtccggcccgcccaaatggtcagtgataagccggaagccggtctttgtgcgcttcaaataagtcatcgcacaaagatatgatgtcattcatggaaagctcggcgcttgtatgcgggtcaagcatggccgcctgatatacggcttccttttttaatgtaacggccgcttcgatggttaaaagctgtgtgttaatgtttgttctgttgagcgccgcgagctgctccggaagttcgcccgaatagcacggcataatgtggtttttgacggctgtgcaaggcacttcaacgaccgctttcgccggcagattcggtatcagcccggtattcagcacattgccgccgaatgtgaacggtttgcccgtctccatcgcttcaataattctcgaaccgtattcttttgagcgttcgtgcgtcaggttttggttgttgatgatgccgtctctcatcgtttcccaattgttgatttgttccgcgcatctcctcggatattcatcaagcggaatttggagttcatctatcagctcaggataccggctttttataaaatacgggtgatattcggcattatgctcagatgattccgttacgtagcagccgaatttatccatcagctcaaaccgcaccatgtccttatgtttcgtcttttgtttttcgcgtgcccgtcttttaatttcaggatataaatcaattccgtcttttttaatctccaaaagccaagccatatggttaatgccggcaatgcgttcttccgtcccttcgtgatccatgccgagtgagtcaaacagatctttggtacatacctggacgctgtggcacaggccgaccgttttgacattcgtatgtctgagcatcgctccggtcagagaggccatcggatttgtatagtttaacagccacgcatccgggcagacctcttccatgtcttttgcgatgtcaaataaaacggggatggtgcgaagggaacggaaaatgccgcctattccgacggtatcggcaatcgtctggcggagaccgtaccgcttcgggatgtcaaagtcaatgaccgtcgcgggtttatagcctccgacctgaatggcgtttatcacatagccggcgtgtttcagcgcctgttttcggtcatcgtaggagatgatggatatactcgtattgtagcggtctctcatgttttccagcatgagctgggattctttcagccgtacagcgtcaatatcataaagcgcgaattcaaacccgtttaatgcttcagtcagtaagcagtcccccagtacattttttgcgaaaatcgtgctccccgctccgataaacgtaattttcttcaacagaaattcctcccttttcttctcagcctttgaccgccccggaggacagccctgagataaaatatttttgaagcgccaaaaacaatacgaccatcggcagcatcgccataattgcggctgcggcgactaagtgaagattgttcgcgttttcgccgaaaaatcccgccatggccacagtcaatgtctgcaccttttgatcttgtaaaaagaaaatcgcaaattggtaatcgttccagataaacacacaggaaataatgcagaccgttgcggtaatcggtttcaacaaaggaaacacgattgtataaaaagtcctgatcaatcccgcgccgtccatcctggcggcttcctcaagctctttcggaatggaagagcggataaaccccgaatataagaaaacggtcagcggcatatatgcagccgtattaatgagaatggctgcggcatgcgtattgatcagccccgcatcagcgaccatcttgtataaaggaaccatggaagtcaaaggcgggatgatcatgattgaaatcaaaaggccgaagacgattttgttcagctttgtatttcttcttgcgagcgggtatgcggcaagcgaacccatgaaaattaataaagcggcggaaacggctgtaatgataatcgtgttcagaaaggattgcccgagagaggcacgttcccatgcttcacgaaaattctgaaatgaaaaggcggatggcagcgaccattttgaactgtagtcaccttttgcttttaatgacgtggtcagcaaaatataaaaggggacaatatgaacgcacgagataacggctgccaacagcgtaaaaatccgcattcgggctgttttcatgacatttccgtctcctttcgcttgaaatacacgagagccgaaaagctgatgacaagaataatgacggacataaacacgccttgggcggcggcatatcccgcatcctgccgtttaaaatataaatcatacataaacgttgacatcgattgagaggaattgcccggcccgcctgcggtcagcgcgaaaatgacatcaaacagcttcagcccgccgatgatattgatgaccatgttgatggtgacagccggcatcaataaaggcagggtgatggtgaaaaacggctgaagacctcccgcgccatccatttttgcggcttcgtaataatctttcggaatgctttgcagccccgccaaatatacaatcatcgcaatgcctgcgtattgatatgtgttaatcatgacgataatccacgggtttgccgcagggcttgccaaggcgttgacaggaccgattcccagtgcgccaagcacatcattcagcgcacccccgtcatatgagaaaataaaataccaaatgtatcccataatcagcggactgataatgacgggcaggtagacgatcgttcttgtgagcgccttcatttttaagctctgattcaaaagcagcgcatataaaagtccgagcatattctgaaaaaaagtgcttccgatgccgtaaagcaaagtgtttttcacaacaagccacgtgtccggatctgtaaaaagccttttatattgagtaacccccacccattgatacgtctgtgagaagccgttccagtttgtaaatgtgataaaagcgcctttgacaaacggaaaaatcatgaaaataaaaaccgtggcaagagcgggaacgtacatccaccacagtgacgcgggttttaccggcttttgatgttgaaatccttgggtttcttttgcaagatcactcattctttttcagctccccatgaatcagattgaagccgaagccgcttatattccctgccgagtttcgctgaaatttcagcgggggttaagatatcggccatcagctcctgcccggctgttcccatcacatcccacattccgttcggcaaataaaggcggtcaaaataaggctgcaccttaatatgctgatagcgcttatagtcatttgcgtagaaaatgtccgtttgcacattcactaatccggccggaagcgaggtcgcttcggcaattgattttgcatgctcgggtcgggccataaatgcgataaactgtttcgcttcttcaagccgcggggaatccttgaatgccgccagcgtgtaacgttcgcctccgatccaaaccggcgcgtctcccttatggacggccggggtcggtatgatgccgacttttaccttcggattgatttgagcgacgtcttggccgagggtgccgccctgcagcgtaaaggcgattttgttttgcgccatcagttcaatgagctgggaccgttttgccgtcacggcatctatattgagcaggttttccttttgcatctctttcagtttgtcagataaataggtgaagtgtgtccagcggaaggttccgtttaacagttgttttttgtaacggtgtgcgggatctgtgatgagaagcggtgcggcgaattgatcgtaatattgggcaaatgagcttttctcatagccggcaaaccagaagggggtgactgttccgccgcttttttctttaatctgtcgcagtgccttcataaaatcatccattgtttccggcggtttgattccgtatttttctaacaacgtacgattgtaggccagtccgtcctttgcctgattcagagggaaggcgtatattctgcctttggcgtctttgagcatgctgtttaaattcggatcgagccgcttcgtccaagacatgccgctgaggtcggcggtatattctccgtagcggattttggcccagccgtgtgtgtcgaaaagatcgggcatatcaccggccgccatcctgaccctcatcatattttcgtagtcattgcctgggaaatgaacgtttacttgaatgtccggatgttctttttggaatgaatcagccaactttctgaatacggcgcgttcgctgtctgaggatatggtggaatagactgtcaatgttttctgcttttctccggcgccgctctgttctgccgagcagccgggaagtatcatgcaagtaaaagaaagaaacaaagccagtaagcgtttcatcttttcctcctttaaatatgatataaacgctgcgggacacgtcaccacctttcttgtgagccgcagctttgtctgacaatcaatgaagtggggagcgtcacggccagcgggacggttctgccgtttaaacggtcgagaagcaatttgacacccgtccggcccatctcttccgtgtatacttttaccgttgataacggcgtgctggcgtattctgcctcatcaattccgttgaagctgacaaccgccgtatcgcgcgggacttgaaggccggcttcctgcaaggcttttaaagcgccgacagccatcgaatcacttgcgataaaaaaggcatcggggagacttccgcctttgacggcttcattcatcagccggaacccttcgtgcatgctgtattcgccgatcagtacatgctccggctcggcgccggccatttgtaagaaagcggtcagacgcttatcctcaatcgttttattgctgtttacaccgtctatgacggtatgttcccgctcccggccgccgatataaccgagccgctggtaaccgagcgacagtagatgttctatcgccttttgcgctgcggcataaaaatccacgctgacggaatcgtagcgggcgggatcgggggtgccgttaacaaataccgcgtgcctgaaagcggcgctgatattcgtaagcgcctcgtcttgcaggctgccgatgacgatgacgccgtccagttcgtgaaacatatgctcttgaaaagaaccgagatggatagaagatgtgataaaaattttttgccgaaagcattcttcttcaatgccttttcggatcgccgaaaaataaggatcctgccgttcttcttccggtgacaggcagctgacaacgccgatcaggggcgctgaatcgctgcggctgcggttcttccgtttttttgccgacggctgatagcccagctcatcggcgatcctcagaactttttctcttgtttcatcagtcacagccaaagagtcatccttattcaaaattctcgatactgtcgcgctggatacagatgcctgtaaggcaatatctttgagacggaccatttcgcatctcctttttactaaatatttactaaacagaaatgacctggttattgttaaaatgatattatcatacgagagtaagcgttttcaataactatttttggttacttttagtaaaaatcagtaaaaaagaaaatctgtttttctctatcatatttcaattgaaccggaataaattgatagagaaaggagagggtgatgtgctgaagatagctgtttttgatgaggagcatgaaaaggatctgcagactgaagtcaatacatttttaaaggggatttctgatgaacagctcgttgatattaaatatacggtagcggcggcctgtgatcctgaaggtgagcagctttattgtttttccgctctcattttataccgaaaataaaaaagcccggacgaaatgccgggcttcgttgttcattatgcttttttgacgcggggacttcttggtttttggtatttctccgcttgtttgattccttttctctcgctcgctaatgacttgtacagagacacgatcatcagaaggatcacgactgaaaacggaaccgcggcgagaatggccgtgttttgcagtgcggccagaccgccggaatataacaaaaccgctgccacggcggactggatgacgccccagatgattttcacccggtttgacgggtctaaagagccgtaagacgtttgcattccaagcacaaatgtcgctgaatccgctgatgtaataaagaatacagcgatcagaacaagcgttaatacggatgtcaccattgtcagcggatagtggctgagtgcgccgaacagcatcgtatccgttgacattcccgcgacattgaatacgcctttctgctgaagatccatcgcggatacaccgaagatcgcaaaccataagaaagccaatatacaaggtgtcaccaacaccccgattaaaaattcccggatcgtccggccccttgatacacgggcgataaaaatgccgacaaacggcgaccaggatatccaccaggcccaatagaaaatggtccagctgttaatccattcgcgtttttggggatcattcggagacaagcgaaagctcatctgcacgatattttggatgtattggccgatagaatcggtaaatgagttcataatcagcaccgtcggacctgcaatgagcataaagatcattaaaatagccgcgagcgccatgttggtattgcttaagtatttaatccctttgccgattccgctccacgcagaaatcaaaaataacacggtcacgacagcgatcaggatcagctgaacggaaaatgttttcggaatgccgaataaataatgcaaaccgccgttgatctgagtcgctccgagccctaagcttgtcgccacaccgacaacggtcgcaaacacggcgatacagtcaatcgctttgccgatcgggccgtttactttatcgcccaaaagcggtgtcagtgtgctgctgatcaaaccgggcgcgtcttttctgaattgaaaatatgcgatacataaagcgacaaccgcatagatggcccaagcgtgcagcccccagtggaaaaatgtgtaccggagcgcatcccgaaatgcttggggcgtttctgtttcacctgagggagagctgatggcgtaatggctgatcggttccgcagccccgtaaaataccaaaccgattcccatgcctgcgctgaaaagcatggcaaaccatgataataagccgaattccggtttttccccgggttttccgagttttattgtgccgatcggacttacaatgagaaagagacagaaaccgacaaatatagaaacgaccagcagataataccagccgaaagaatccgtaataaatttttgtgccgtatcagtgacttgctgcaggctgtcaggagaaatggccccccataaaaccgcagcggctgtgatgacaatcacaatccaaaaaacactggagatgttcttcttcaaacgttctcaccctctgactatttttttcaatacgccattttgttttagtatggtcgtacgattgcagatcaatcctttcttcctattccctcaatcaggtgaaacaaaacgcagaaaactctatcatgtttttggtcaattatcaatggggacgctcaggtaaatgcgctttaaaccatttagagcgagcgtgagaaacgtcctgcattcaaaccggcgagacgccctgtgacaaaggctgaagtgatattgtagcccccggtatagccgtgaatgtcgagtatttctccgcaaaaatataagccttccattttttttgacgccatttgtttcggctcaatctcttttacggaaacacctccgcctgtgacaaacgctttgtccaaagaaagcgttccgtcagcggcaaccgtaaattgtttgcagtctttgacaaaagccctgaattgatccttcggcagttccgtaaagcttgtctgcggatcaagaccgttccgttccagaagaaaaagcaggtaccgttcctgcatccacggcttcagcgcatttttgagcgcttttttcggtgcgtctttcagttccttgtgcatcttttgaaataactcttcctcgttgatgccgggaaacagatcgatgcggagtttgacctctggctgctttttcagttctttgacgacaaactggctgcagcggagaatggcggggcctgacaagccgaaatgggtgaacagcatgtccatcacgtgtgtgacgattggtttgccttttttattcaggacgctgacggccgcgtttctaagagacagcccctgaagtgttttttgtttaataaacggttctgacgacgtaaccggcacttccgtcggaaagagttcggtcacggtatgaccggccgcttccgcccatgcatagccgtctccggtgctgccggtatgcgggactgattttccgccgaccgcgataataacggcgtctgcgttaatgtgttcgtcattgtttgtcgtaatgcctgctgtcctgccgttctcgtaccgcacttctttgattttttcatttgtgcggatggtgacattcagttgttttaatcggtttaaaagcgcatcgacaacgctttgcgctttgtccgtcaccgggaacatgcgcccgtggtcttcttctttcagctgaatgccgagtttttcaaaaaaggcgatgatatcttcattattaaattcggaaaacgcgctgtataaaaagcggccgttgccggggatgtgtttgatgatttcttcaacggggaggcggttggtcacgttgcagcgcccgccgccggaaatcgccagcttccgtcccagcttgtttcctttatcgattaataatacgtccgccccttcttcgcctgccgcaatcgcagccattaaaccggacgggccgccgccgatcacaatcacgtcataatgtttcatctttcatcaacaactttctttttcacgtataataggcggaaatgtccgctttctgctattatagcgaaagaaagggaatccttaaacgtattttgttttttaaagagttttcccaaaaagtttcccgctgtaattattaccgtctaattgcccagttgtgttaaaatagaaaagttgaatcttcgtagaaaatggtgatgaggaaacatgtcaagcaaattgttaaggggcacgttcgtgctgacgctcggcacctatatatcgcggattttagggatgatttatctgatcccgttcggagcgatggtcggagcgacgggcggagctttgtttcaatacggatataatcaatatacactgtttttaaacattgccacgatgggatttcccgccgcggtttcaaaatttgtctcgaaatataattccaagggagactatgagacaagcaggcggatgctgagagcgggaatgtcggttatgctcgtaaccgggatgatcgctttttcaattctttatatttcggcgccgttttttgcggaaacatctctcggcggcacgagtaacaacggacttacgattgaccacgtcgtttatgtcatccggatggtcagtctggcacttttggtcgtgccgattatgagtcttgtgcgcggttttttccaaggtcatcagatgatggggccgacagccgtttcacaggttgtggagcagcttgcccggatcatctttttattgggcgcaacgtatttgattttaagagtgatcaacggcggccttgtcatcgcagtcggatacgcgactttcgcggcgctgatcggatcattcggagggcttgtcgtcctttatatttactggaataagcggaagggcgatcttctggcgatgaagccgaatctcgtccggtctgcgaacttaagttataaaaaaatgttcattgagcttttcagttatgccgctccttacgtatttgtcggactggcgattcctttgtattcgtatatcgatacgaatacgtttaataaagcgatgattgcggcgggccataaggatatcagccaggacatgcttgcgattgtcaccctttatgtgccgaagcttgtgatgatcccggtttctctggcgaccgctttcggtctgacgctgattccgacgattactgaatcgtttacgagcaggaattataagcttttgaaccagcagattaaccagacgatgcaaatcattctgtttttggttattcccgccgttgtcgggatgtccgtgttatcgggtccggcctatacgtttttctacggctctgaaagtcttcgcccggatatcggacaggatatattgttctggtacgcgcctgtcgcgatactgttttctctgtttaccgtaaacgccgcgatcctgcaagggattaataagcagaaatttgctgtcgtgagtcttttcatcggcgttattataaaagtggtgctgaacgtgccgctgatcaagctgtttcagggagacggggccatcttggcaacggcgctcggttatatcgcttctcttctgtacggttttattatgattaagcgccatgcgggctattcgtatacggtacttataaaacgggtcattttaatcgcggtcctgtccgtcgtgatgggagtcgcggtcaagctgactcaatggctgctcagcttctttgtaacataccaaagcggccaggtgcatgcggcgattgtcgtctttgtctgcgccgctgtcggcggtgcggtgtacatgtttgccgcgtaccgaatcggatttttacagaaaatgtttggaaaccgtctgccccgcgttttgaggagaggcaggcattccgcccattgagaaataatgaatagtccgcttatcgcgggcttttctttttaaaggagaggatcaggatgagacttgataagctgcttgccaacagcggattcggctcaagaaaagatgtgaaaaaaatcgtcaaggctggggctgtcatgattgacggagagccggcgaaagatgtgaaaacccatgtcgatccggaaaaacaggacatcacggtatacggagagccggcagactatcgtgaatttatttatgtcatgatgaataagccgcaaggagtgctgtccgctaccgaagacagccgccagcaaacggtggttgatttgctgacgcctgaagaacagcgatttgaaccgtttccggcgggacgtcttgataaggatacggaaggctttttgcttctgaccaatgacgggcagctcgctcatcgcctgctttctccgaaaaagcatgtgcctaaaacatatgaggtccggttaacctcgcctctgtcaccggaagacatcgttcatctggaaagaggcgtcgtcattgaaggaggctataagacgaagccggcagccgttgaaatcattacagaaagcccggatgaaacggtgattcacttgaccattacagaaggcaaatatcatcaggtgaagctgatggcaaaggctgtcggaaatgaagtggcttatttgaagcggctttcgatgggggctgtttctcttgacccggatcttaaaccgggagaattccgcgagctgactgaagaagagctcgaaacgctgagaggcgctgaagtgtaatcgatatcagaaaagcccaaaacagatttgttttgggctttttatatagaggaacaaaaaacaaggcaaagacgctgctttgccttgcagcatgtcaggccgaaaagggccttatgtaattgttcgcttaagatgtaattttcactttttttcgtgttgtctcccacttgcctcggctaggactatgaacaagatcattgtatgctaacacatttaagtctcgctgaatggttctaggtgtaatgccgaattcatcaaccagttcctgtgttgtcacaaggcctttttcctggatgaacatgtaaactgatttaatccgagtcagcatacgatttgttgaaggtttcaaaaaaccactccctatcataagatcggatggacttgatataccacaactttcgactctaaaacttcgtacgaataagcaacaaaggatgacattctgttttttctcttttaactgcctccattatacacgatatggacaacatgaatctaggaataagcgcagataattttttccaaatgggtgccgccttggtgcattactatgcccggtccgcttttattattatggaaactgaaactttttttatacatgtccgtatgaaaacgggggagtgagaagtttgggagaattattgaatgcaaacattgtctgcgccggttatgctgacaggccgaaggtgatttctgatgtatctctgtcagtcaacgctggtgaaattaccggtttaatcggagcgaacggcgcggggaaaagcacagtgataaaggcggttctcgggctgtcccgggatatagagggcggaattgagtggaatgattcatcttatgcttacataccggagcgtccgagtttttatgatgaactgacgctttgggagcatctcgagctgaccgggtcattgcggggcatggaaggggaagagtgccgtgagcgggcagggcggctgcttgaagagttttcgctgacgtctgtaaaacatgatttgccttccggtttttcaaaagggatgcagcaaaaattgatgctcatacaggcatttttggcgaagccggatatttacatcattgatgagccttttatcggacttgatccgatctcaacgaagctgtttaccgacatgctgattgctgagaaagaaaggggcgcggggattttgatgtgcactcatgttctggatacggcggaaaaaatctgcgaccggttttatttgctggatcagggcgctctgcttcttcaaggcacgttagaggagcttcaggaaaaaacggggagccgttcactgctggattgcttttattcagcggttcggagcagtcagcgatgaccgggcgggctttgttttttcaaaggctgtttcattattggcggtatcaatggaaggtgtttcagacggtcattgattggacggtcgcgctgtatatcgttcttcccgctgccgcatttgccgtttatcaatatgctgattggctgaacggcagggggcttcttaatggagcggcaggagtattaggatggggctggctgtatgtattcagtgccctgctattgtgcacgggttttattcatacctttttgctggaagcggatcacgtatttttggtgcatgcaaaacatctgatgcaaaagctgaaacggtacgcgcttttgtattcgatgttcctttcccttatcaaatggggtgcgcttgccgtattgttatttcccttatggcgccaatacggtgactgtaccttaccggcatattcgggtatgttttgctgtctgttcggcttccatactgcaatattagcggtgcaccgacacagaaaaaacagcaggcggacattcgggaatcaggcggcaggctggctgaaagtgatggttctgatggcgggtgcgttttttatgatcgtctttgccgccgaatggtattggctttggccggcgggatgtatattgttcatctgttccgctcttttgacttggaaagggacggagacattatcggcctttgaggaagaagtgcttgaggagaacaggcgcaagctttcattcgcggcctctgttttgatgctcagccatgatgtgcagctcccgaatggtaaacataaagggcggagcaagccgtttttatatcccggctcaaagcacatctttacaaaacggtcggcgtatacggcgtggaaagaattgttctttaaagtgctgatccgaaacggcgggtatctccggcagctttaccttttaaccgcggcttttacggctcttattctcgttcttccgctcttagtgaagccggcagtcctcattttgtttgcaatcgtcagccgctatgccgcgtcacttttatttgaccggatcacggataaaccggttttaagcggtatcaagagagacagtgatgactatttcagggcgcgaaacagcgcattaaccgtcatccaagtcatctgttccgcctggtgtctcattgccgcgattctttccgttctttatatgtgaaaatccctttccgaaaaaggaaagggatttttcttaatgtccgttcaaaataaaaagctgaataaaaaacagcacggcgaagatgatgactaaaggatggatttcgcgccattttttcttagctgctttaacaagcggatatgaaatgaagccgagtgcgattccggttgaaatactggacgttaaaggcatcgccaaaatgacgagaaaggccgggaacgcttcatcaagctcattccagcggatattcgataccgcacccatcatcaggctgccgacaataatcagagccggtgacgtaatcgcggacacttccgataagacgctgacaagcgggctgaaaaacatggaaacggcaaacataaccgcaatcgtcagcgccgtcagacccgttcttccgccggccgccacacctgctgaagattcaacgaacgcggtcgtcgggctggtgccgaagatgcttcccaccgtcgtagcggtcgaatcagccaaaagcgctcttctggcattcggcagctgattgtttttgatcagtcccgcttgttcggcgacaccgatcatggtgccggtcgtgtcaaaaatcgtaacgagaagaaaagaaaacacaacggcgtacagaccgtgatgcacgacatccccgagggctccgaacggatttgtgatcaaaagcccctccggcaggtgcgggaaggacatgaatcctttcgtgaaatgaatctgaccggtcaaaaaggcaatgatagcggtcagcgccattccgatgaacagagccccgttaacattcagcaccatcagtacaatactgatgataagcccgataagcgttaaaatgacggcgggcgaatgaagatcgccgagtgcgaccagattagatttatcagccgtgatgattccggattggcgtaagccgataaaagcgataaataagccgatgccggtcgtaattccgtattttaaattgtccggaatcgcttctataagttgttttcttaaaggcgttaacgataaaataataaagatgactcccgcgataaaaacggcgctgaaagccgtctgatacgtaatgccgctgcctgtgccgacaacgtgaaaggcgagatacgcgtttaagcccatgccgggggcaatggcgatcggaaaattcgcagcgagagccatccataaagttccgacaatggaagcgataatcgtcgcggtgaacacctggtcaaacggaattcccgcattggaaaggatcaccggattgacgacaatgatatacaccattgtgaaaaaggtggtcaatcccgcggtaatttctctttttattgtcgtttgatgcttgtcgagatgaaacataagtacctccaatgacgaacattttttcaaaacatcatctatattattcgttttatcgacattttgcaagtctttatcaagaaaggggatttgtgatgaactgggaagttgaagtcatcagaaacaaagaagatctgatccgtgacacgcagaagtttttgcagatcaacagcgtaatggacgaatcaacagccggtcccggccggccgtttggagaaggcgtcaatgccagcctgacgtcactgctggaattcggtgaaaaagaaggcttcaccgtaaagaatcttgatggctatgcgggccatattgaatggggaacgggtgacgaaatcgtcggcgttttgtgccacgtcgatgtcgttccgcccggagacggctggacgagcgatccgttttcagccgatatcagggacggccggatatatgccagaggcgccatagatgataaagggccgacaatggcggcgttttatgcgctgaaaatcgtcaaagacatgcagctccctttatccaaacgcgtgagaatcatcatcggaacggatgaagaaagtgattggagatgcgtggatcactacttcaaacacgaaaaaatgcctgacatcggctttgctcctgacgcggattttccgatcattaacgcggaaaaaggaattatagatgcatcactgcgcattgtaaaaagcgcttctgacaaagacgcaaaaaatgggcttctgtcattccgttcaggactgcgcttgaacatggtgccggatgcggctgaagcggttattgaaggggacggtcttgatgccgtgcacgcatatttcagcaaatggcttgagcagtcaaaaacacaaggtgaagcaatttcggaaaatggaaaactgacgcttcgggtatacggaaaatcatgccacgcgatggaaccggataatggtgtcaatgccggcttaaagcttgctgaatgccttaacggaacagagctggatgaagccggaaagcactttgtcaaaaccgtcagtgactattttttaaatgatacacgaggcaaaaaactgaaaattgattgcagggatgacatcagcggagagcttacattgaatgtcggcacctttacatacagaaagggtgaggaaggagaactcggcatcaacatccgttatcccgtcacttcagacagcaaagtcatccgtgatgcttttacgtctgctgaagaattccggcttgaagaatttaaagacagcaaaccgcaccacgtttctgccgatcatccgctcgtaaagacgcttcaaaaggtttacgaaggacagacgggaaagaaagcggatctgatttcaatcggcggaggaacgtatgcgagatccctttcggcgggcgtcgcgttcgggccgctgttccccggccggcctgacagcgcgcatcaaaaggatgagtacattgaaatcgatgaccttctccggtcaaccgctttatacgccgaagccatttatgagcttgccaagtgataataaaaagggacgccgaaagcggcatccctttttatcattcaaatgaccataaatccgttgataaataacgttctcccgtatcggccgtcatacagatgacgatctgttcggaagggaggcgttttgcggtttcaatggcggcgaagcaggcggcgcctgaagacgggccgacgagtataccttcttcccgggccagacgacgtgttgtcgtatacgcatcttcatcagatattttcatgatttcatcgtaaacgtcctgattcagtatgccgggaataaatccggggcttgtcccgacaagcttatgagcgccgggttttccgccagacaggacgggagatcccgcgggctcggcgacatgaacaatcatatccgggaaaagctccttcagcgtttctccggttccggtaatggttccgcccgttcccgccgttgccacaaaagcaccgagcggtctgttgagctgctgaacggcctgatagatttcaatggcggtcgtttttcggtgggcatctggatttgcgccgttatcgaattgcatcgggataaaacttcccggaatctgttcggcgagttctttcgcttttttgatgcttccgggcattctttccgcccccggtgttaacacaacctccgctccgtacgctttcaggaggttgatgcgttctttcgtcatcgtgtcaggcatgacgaggattgccttgtagccgcgcgccgccgcgttcatcgccaggccgatgcctgtgttgccgcttgtcggttcgatgatgacagagccgggttttaaatgcccgctgttttccgcctcaatgatcatattgtaagccgctctgtctttgacactgccgctagggttaaacgattctaattttaaatagacctgtgctgcatgttctggctgaaggcggttgagctttacgatcggtgtgccgccgatcagctccgccgtgctgtttacgattttcaaggccggctcattcctttctgtataaaacgttcggtacataatatcctatcataatgagcggacagggttctcctctccgcttatccgttttataataacaccataaccaaagagggggagatcctcgtatgaaagcttcattgccgcattattttatcggcattccgattccggctgacattgctgaaccgatttgggaagcagccaaaaaggagccggcgttaacattcaaaaaatgggtgcacccgcatgactatcatattacactcatttttctcggagccgcggatgaagaacggcttgcgaaattatcgtctctgctcgcagatgctgcgtcggcagcgcagccgtttaccgtacagtttcagcatctggatattttcggcgaccgcagacagccgagagtgcttcaccttgagcccgaacggaatgaactgctctttgatttgcgggaaaaaacaaaacaggctgttttgaaagccggttttcaagtggaaaaacggccttatcaccctcatatgacgatggcgcggaagtgggcgggagaccggccgtttcctgacgatgtgccgtttgaaagcggcagggtgcaaagtgccgtcagccggttttccctgtttcagacccatcttgaccggtcgcctaaatacgaagaaatcgcacagtttcaattgacataaacaaatattcggagtggagaaatcacatggcacagatcatcaaaattcacgactgcatatccagatatgaacttgatccatatcattatatgaaccagtttatccggctgaagaaagaacgctttgaggcgcttcttgaagcgtttgaccggatgacggaagaaaaagaaacggaaacggctgcaggcggggaaaccgatcaagcgtcggccaggaaaaaattttccttaaaaaagagaaaagaagaaaatacggccgatataaatgaaaagaggcaccaatggtttgatgagccggagggagaagaggcgctgttcgggaatctcccgtctcgaaagtctgagctcgcgccttttttcaaagatcagctgtatgactttcaattaaaatgggcgagctccacgctttctcaaaagtctgagctttcgcaggcggtcaaaagggacaggatgttaaaaatgctggctcaaaagctgcccgattcctattttgtgatgtatcatccggttctgcaaattcagcaggcgtccgttgaactgagcatgatcatcatctcgccgctggagattttctgcgctgcttttatggaagcggaagaggacagcgtatatatcggatcaaaacaccgtttttgggaagaaagaggctccggcagcacgcgtcaagtattgaatccgtctctcagcctgcaccggacaggctcggtcgtttcgcaaatcgtaaaagaaaagcaggccgacattcccgtgcggaagcttttgctcagcagaacgtcttatattgattacccggagccgccgtacgggctggaaatagctgataaacggactgccgcagagtggctggaaaagcagcagaaaaatacggcgccgatcaagcaccaccagctgaaggcggcgaaggctcttttgtcttacggcttgagcgattcaagccggagacaggaatggcttgattaaaacggatgtttgccggctgtctcttcatctatgaagcaggtgaaaacaaacgatgagtcaatggttttttattattaatccggtctcaggaggcgggcggagccggcgtgtctggaaatcagttcaaaaagagctgaccaggcgcggggtcagccaccgctcttttttgaccgggcatcccggacatgcggaggtgctggcgaggcagatttcaatgatgcaggatcataagcttaagcggctgttcgtcatcggcggtgacgggacgatgcatgaagtcattaacggactgaaaggaacggatcagattgagctgacctttgtgcccgccggttcgtacaatgacttttccaaagggctcggtattaagaagtcggcgctcctccaagaaatcaaaagtctgcaccgcccgctcacacggaaattttttgcgggaaacatcaacttttttcatgacaaagcgcaatcactttattttattaaccacctgtctgtcggcttcgatgcctcagttttgaaggcagcggcgaattttccgttatcgcgcgttcttcggtttttgcgtctcggttttgtgatttacccgctcgcgcatttacatacggcctcggggtttcagccgttcagatttgtttgcacggcagacggccagaggcgagaattccgcaatgtctggtttgtcatagcggctaatcacccttattacggaggcggcatgaaagcggcgccttcagcaaatccccgtcaaaaccattttgatattgtcatcgcagaaaacctgtcctttttctcgctgtatcgttttttatgggcgatgagcttcggccggcatatcaaaatggacggagtgacgatgataaaggggaaggaattcgtttttgaaacagatgggaaaattccgtttcacgctgacggcgagctgatcggaacgacgccgtttcggcttatgccgggcggtgcgctgttgaaaataaaaacataataaacaaatgaaacccgtcaaatgtttcacggcaaagagcggttcgcggcataaatcttcagaattcacaggtgttcttgctagttttgcttgacgaagtttgtgctgtagcgctaaaatttataggacggctattgattagcatatgagactctcaatagctgtcttttttattctcatgaaattgtttatgacaggccgctccgccaatagagaaaggctggaggcctattctaaaatattttaagaaatgatgggttgaacattgatatgaactggttgggacaattactaggtagcgattgggagatcttccccgccggaggagctacaggagatgcatattatgcgaaacataacggccaacagctttttttaaaacgtaatagctcgccctttttagccgtgttatccgccgaaggcattgttccgaagctggtttggacaaaacggatggaaaacggagacgtcattacggctcagcattggatggcgggcagggagctgaaggcaaaggatatgagcggacgcccggtggctgagctgctccgcaaaatccacacatcaaaagctttgctcgacatgctgaaaagattgggaaaagaaccgcttgatccgggcgcccttttgtcgcagctgaagcaggccgtctttgccgtgcggcaattttcgccgcttattcaggaaggccttgcttatttggaagctcatgtggatcaggtgcaattcggtgaaaaagtcgtttgccattgtgatgtgaatcataataactggcttctgtctgaagacaaccagctgtatttaatagattgggacggcgccatgatagctgatccggccatggatctcggccctttattgtatcattacgtcgaagagccagcgtgggacagctggcttgggatgtacggcatgaagctcacggaagggcttcggctgaggatggcgtggtacatgttatcggagaccatcaccttcatcgcctggcacaaatcaaaaggaaacgacaaagcgtatcatgatgccatggaagagcttcatgccctgatgaagcggattgtcaagtagtcaggagtacgaatccatctgctccacccattgggacaaatggttttggtgctcctgaatatgcgtgtcgatggaatcggccgtgatgccggactggctgtagcggtagacatcctcgagcacgttttttatatttgaatcaagcccggtgttggccatcagtgatttgatgacgcgctccagctgttcatactcggcaaccgtgccgcagcaatccaattgatggtcggccaatatgtcctttaataaccggacctgatgttcgcttgttaagcccatgattcatatacacatcctttctgtgtcatacattgtgcaaagcggtgcggttttatgcatcacatgagtgttccggaccggggagcctctttttttatgcagccggcgcctttaaaaggcgcttgcggctctttatgtttcatggtatgttgttactcgaaattatagatagaggtgtcaatcatatgagaatgcgccataaaccttgggcgaatgattttctggcagaaaacgctgacatcgccatcagtgatccggcccagtataaagggcgatggaacacggtctttggcaatgacaacccgatccacattgaagtcggtacgggaaaagggcagttcatttcaggaatggccaagcagaatccggatatcaactatatcggcattgagctgtttaaaagcgtcatcgtcactgccgtccaaaaagtcaaggacagcggggctcacaatgtccgtttgttaaatatagacgcggaaacactgaatgacgtatttgaacggggagaaatcaagcgcgtatatctaaacttttctgacccgtggccgaaaaaccgccacgaaaagcgccgtttaacatttaaaacgttcttgaaaaaatacgaagaagtgatgggcgaaacaggtgagattcattttaaaaccgataaccgcggtttattcgaatactctctgaaaagcttttccgaatacggcctgcttctgacggaagtcagccttgatctgcacaacagcgatccgaagggcaatattatgacagaatacgaagaaaaattctccgcgctcggccagccgatttaccgggccgaagttgaatggagaacaaaaggcagactctgatgcgggagtctgtttttttatgccgccatttgctaccattacatcaggagggatcaagatggagacattgaatattgggaatatttcattaacatggctggacggcggtgtgacgcatatggacggcggagcgatgttcggcgttgttccgaaacctttatggtcgagaaaataccccgtaaatgacaaaaaccagattgaattaagaacagacccgattctgatcagaaaaaacggcctgaatatattggttgacgcgggaatcggccgagggaaattctctgataaacaaaaaaggaattacggcgtaacacaggaatccaatctgaaacaatctcttcgtgacctcgggctttcttgtgaggacattcatattgccgcgatgacccatcttcattttgaccatgcatgcggcctgacggagtacagcggagaggagcttgtctctgttttcccgaatgcccgcattatcacttctgcaacagagtggcgcgaaatgagaaaccctaatatcagatcgaaaaatacatattggagagaaaattgggaggcggtacaagatcaggtcgaaacctttgaaaacgagtatcagctgacagaaggcattacgatgcaccacaccggcggccacagcgacggccacagcgtcatcgtcttagaagacggtggggaggcggctgtgcattttgccgacctgatgccgacgaatgcgcataaaaatccgttatgggtgctggcctatgatgattatccgatgacctctattccagaaaagcagaaatggcagacgttcgcggcagaaaaagacgcctggctgattttctatcacgacgcgatttacagagcggtaaaatggggagaagacggcgaagtggctgcatctgtcaaacgggagagaaaataagcggatcgatgatttgcctgtatgaatttcgggaataaaagcaaacctaagacaaattgctttgaaaggaagagacaggtgaatcaatttcaagtgaccaaagatggagaaatcaaaacaactctgcgcggattagaagtgctttctacgccttttttaaataaaggggtggcctttacacaggaggaaagaaaggaactcgggctcgaggggtttctgccgccgaaagtattgacaatcgaagagcaggcgaggcgtgcctacgaacaattcagttcgcagcctgatgagctgagcaaaaatgtgtacttgaccgctctccatgatcggaatgaaacgttattttacaggctgttaaatgatcatttaggcgaaatgctgccgatcgtatatacgccgaccgtcggcactgcgatccagcgttacagccatgagtacagaaaaccccgcggtctgtatttgtcaatagatgaccctgaaggaatgcgcgccgcatttcagcagttcggaaaaaatgaaaacattgacttaatcgttgcgacagatgccgagggcattctgggaatcggtgactggggcgtcggcggcatcgccatttctgtcggaaaacttgcggtgtatacggcggcggcaggaattgatccgtcacgagtgcttgcggtcgtattggacgcggggacaaatcaggaaagcctcttaaatgacccgctgtatgtcggaaaccagcattcaagagtgcgcggcgagaaatatgaccgctttattgatgagtatgtctcgcttgcccgggaaacattcccgaatgcgctgcttcattgggaggatttcggtacggctaacgcccgcggcatattaaaacggtataaagataaagtctgtacgtttaacgatgacattcaaggaacgggcgcggtatcgcttgcagctgttttagcgtgtgcaaaagcatcaaaagtgcctttaaaagagcataaagtcgtcgtcttcggcgcgggaacggccggtatcggaattgctgagcagctgcgcgaagccatggtgcatgacggattaagcgaagaagaatcctacagccatttttggtgtatcgacagaaacggattgttaacggatgatatgaaggacttgcgtgattttcaggttccgtacgcgcgccctgctgatgaagtaaaagagtacggccgcagcggtgaaggcggatcaattgatctggcggagacggtgcgtcaggccaagccgacgattctgatcggcacatccaccgtatcaggcgcatttacggaagaaatcgtcaaagaaatggcctcgcatgtcaaacggcccgctattttgccgatgtcaaacccgacgacattatcagaagcaaaacctgaagatttgattaaatggacggaaggccgcgcgcttgtcactacgggtagtccgtttccgcctgttgcgtataacggcgttacctaccatatcggacaggcgaacaacgcgctcgtattcccgggactcggactcggcacgattgtgacaaaagcaaggctcattacggacaatatgttcgttgcctgcgcgaatgccatcgccggtatggtggacgtcggcaagccgggggcgccgatgcttccaaaagtggaggatctcaggacggtatcggcaactgtggcggtagctgtagcaaaagctgcgattcaggacggtgtagcggaaacggaacccgaggatctgatccaagcggtgcaggacgcgatgtggcaccccgtatataaacgaattcggccgatgtaaccgaataaagcccaaaacgctgatggttttgggctttattttttgcttgtccgaattatgaggcgacagaatcaatgacatcgacaatctggcctgtttttgcattgaccataacttcatattgctccagttcgccgaatgccgaacgtgtcacgccggtcttgtatacctggatggtttctccgtttacctggtagggctccggctctgtgtaaatccatgatccgtctatcggcccgcgctgtttaaaagccgctttcacgatacggagcgctttttctgaagagatataaggtttcatcgcatactttttcactgcgatggcagcgcataatccgactcctgcacctaagagaaaatgacgtaatttcaatatgaagcacctccaattatgtcgtagtttttattatacagaagatgccagacggtgttaagtaaagcgtcggttttccagcccattcaatctgagcgcttggaaaacggttgtttttctaataaaataaaagcattacatagaaatgaggggaaaatatgaatgaggaaacgaaaacgcttttccggacgctgacgcagcttcccggtgcaccgggaaatgaacatcaggtccgctcctttatgaaacgggagcttgcgaaatatgcggatgacatcgtgcaggacagactcggaagtgttttcggagtaaggcgcggcgctgaagatgcgccgaccgttatggtagccggccatatggacgaagtcgggtttatggtaacgcagattacggataacggcatgctgagatttcagacgctcggcggctggtggagtcaggtgctgcttgcccagcgcgtcgaggtgcagacggataacggaccgattatcggcgtcatctcaagcatcccgccccacattttaacggatgcccagcgcgcaaagccgatggagatcaaaaatatgatgattgatatcggtgccgatgacagagaggacgcggtcaaaatggggatcagaccgggacagcaggtcgtgcctgtctgcccgttcaccccgatggccaacgagaagaaaatattgtccaaagcgtgggataaccgctacggctgcgggttaagcattgaactattaaaagagctgcacggaaaagacctgccgaacaatctgtacgccggggccaccgttcaggaggaagtcggcttgagaggggcgcagacagcggccaacatgattcagcctgatctctttttcgcgcttgatgccagcccggcaaatgatatgagcggcgataaggagctgttcggccgtctcggcgagggggtgctgctccgcattctcgacagaacgacggtcatgcaccgcgggatgagagagttcgtccttgatatggcggaaacgcacaatatcccttatcaatatttcgcttcaggcgggggaacggatgccggacgggtccacatatcaaacagcggggttccgtctgccgtcatcggcatttgttcaagatacattcatacaaatgccgccatcatccatgtcgatgattatgccgcggcgaaagaaatgctcattaagctggtcatggcgagtgacaaacagacggtcgaaacgatcagagaaaatgtgtaaaaaaataagcaggaccgcataaaggcggcctgcttattctgtttcaaataaataagagagtgctttcatcgcttgattgacggtttcgaccgtgatattcgcttttccggaaagctctttcagcggatgatgaagttctttcggacggatgagaatgagcggctttccttttgcgatggcataagaagcatccatcgcggtattccactgcttatatttctcgccaaacagggcgatcacaaaatcggctttttccatcagcacctctgtacggaaattgttgatatcagaagctctggcgtcttttaaaacagaatcgggctgcacgcccataatctcttctccgatattgtctgagcgttcatggttttccatcgggccgacaaacgtaatcggcaggtccagcgctgttgctttttgtttgatctcgtcccgccaatcactgtggatttcacccgctaaatacacgacaaactgcatcttttgcccctccttatgtacatattcatattttcgtacggctacaagcaaaatggtaaacgaaacttgcttgataatgcaaatgaaatatgataatgatattgcatatagttggtcttgccgtaaacagtctggtatgatccaattggacaaacatcagcatataaaaaactcataatccagatggaggaatgacaatgaaaaagattgaaagcacggaagaattgcaaaaagcggtacaagacgattgggcggtatttatgttttcagcggattggtgcccggactgccgctttgtggagccgtttctccctgagctggaagcggactttcctgaattcacttattactacgtagaccgcgatcaatttattgatacatgcgcagaatgggaaatttacggcattccgagctttgttgtgtttaacggaggaaaagaagtgaaccgcttcgtcagcaaagaccgtaaaacaaaagaagaaattgagcaatttttaaccgattcccttgctaaagcataaaggaggccacgggctttgaaaatgacgtcaaggaagctggcggatttattaaaacagcgcctgcagcacgagaaccgatccttcttttttgacagagaaaaagacaccctccgtgttgaggatcaaacgaccaaaaaaggcatcacattggagctcccgccgatcattgcgaagtgggagacgaaaaaagaagaagcgatcgacgaaatcgtctactatgtgtcagaagcgatggaggcgatggaaggaagcggacaggagatgtccggaaaggaagccggaatctatccggtcatccgctccacatcatttcccgatcaaacgagtgacggcattccgctcgtgtatgatgaccatacggccgaaacgagaatctactacgcgcttgacctcggcaagacgtaccgcttaattgacagccgtatgctcgagaaagaaaactggacaaaagaacggatcagggagacggcgtcattcaatctccgctctcttccttcggtcgtgaaacaggatacggttgcggataattatttttattttttcagggcgaatgacggctatgacgccagccggattctcaatgattcgattcttcatgaatacaagcaggccgctgaaggcgaattagcgatttccgttccgcatcaggatgtattaatacttgctgacattcgaaatgaatcgggttatgatattttagggcaaatgtccatgagcttctttgcaagcggcaaggtgccgattacggccctttcatttctgtataatgaaggcagactggaacctgtgtttatcatggcgaaaagccggccgaaaaaggattagaaaggatttttcttatgaacgctttttacaataaagaaggtgtgggagatacgcttctgatctctcttaaagatgcagcacgcgaagaaatcggctatgaaagagaaggcgatgtcgtcagaatctttaacaaagaaacaaaagaaacgacgggctttaacatttttaacgtgtcttcttacttacagattgaggacaacggccccgtcgctttgtctgagacattcgtacaggatgtgaatgaaatactgaacagaaacggcgtttcagaaacgctgacggttgacctttctccgaaatttgttgtcggtcacgttgaatcgaaagaaaaacatccgaatgcggataaactgaatatctgccaagtgaatgtcggagaggaaaccctccaaatcgtttgcggcgcgccgaacgtggacaaagggcaaaaagtcgtcgtcgctaaagtcggcgcggtgatgccgagcggacttgtgattaaagacgctgaattaagaggcgttccgtcaagcggcatgatctgctccgcgaaagaactcgctttgccggatgcgccggcggaaaaagggattcttgttcttgaagacagccgcgaggccggcgaagcatttcaattctaactcccataaataagcgcacagaatcgaatgatgtgagagaaagccgttaagcaggcctgcttaacggctttcttcagttgggagcttaatcttttctgagccgcccggcaatggtatactaaatatcgtcccagactactaaaaagggagttagagagtgattaaacatgagttggctgaataaattttttgacttatttttaggtgaaaaagaagaagagcatgaacatgaaccaaacacgcatgcccaaatcccgaaacagcagataccggatcagccagaaggcaaattcacgcgcatggaagatcctaaaatatattacgaatatccgaaagggaatttccgcttccccgtcgttccggacggctataagcgaacggagcaaaaccaaagacagcgggaaaggcacgaacgccgccagccgtcccgggattatgccgccgggaaggagcaaaccgagcggaaacagcatacacataaagagcctgaaacggtgaaaaagccctttaaaccgtcatccattccttcaccggtttacggctttcaatctcagcacagcataaaaaaagcgcctatatccgaaaagcggcgtgaagagaacgtaacattgctgtcagaggagcaatttgttccgctaaaagccggtcaggaaacagaaaaagagcccgtcttcacaacatacggcataacaaaacagacgaatgaccggccagaaccgtttgcgaaacaagaaacggaagaaatcccggccgttaaaaaagaggagcttcacaccgaggctgagaatgcaaaagagcaagtgtttgcagcagcagaaccgcagcagactgaagagcgggagcacacggaaagcgcggagtctgccggctttacagaagaacaagagcatgaacaaacccgcccgcagcctattaaagagcctgagtatgaagcatcccgaacggctgacaacacagaggaacaagctgcgccgcaggaggaatatcaggagcctgagccggaaaaagcaccgccttttgaaaccgcggaagaaccggtgtatacatacacagaacccggatacgaagaggaagttcagccgcaggctgaagacaagcccgaatcagctgaaaccgacgcgaaacaggaagcagactctcagcctgagtacaatgaagtcacgcggcattcagaccccgagcctgaacctgcaagcatcgagacggccgatgccccgtcccggcctgccgaagaaaaaacggagcatcacggacagcctcagcctgtgaaaaaagcggagcggccgaaagagcgcaatgttccgtttaacgtcatgatgcttaaaagcgataaacacaagcaggcgaagacgccagagggcggagcgagctatgtctttccgaatctgtcgcttctggacgtaccgccggcgcaaagacatgacgaccaatcgtggattgaagaacagcgcgagcttttaaacgttacactgaaaaactttaatgtgcgcgcccaagtcgttcatgtcacacaaggcccgtccgtcacacgttttgaagtgcatcctgagcccggagtgaaagtaaacaaaattacaaacttagcagatgatattaaactgagcctgtctgccaaggatattcggattgaggcgccgatccccggtaaaaacacgatcggcattgaagttccgaaccgcgtaagcaaagtcgtcgatttaaggcagatgatcagaagcgccgctttcaggacgaatccgtctccgcttacagccgcgctcggtgtcgatatttccggaaacccggtcgtcattgatttgaaaaagatgccgcacgggttgatagcgggtgcgacaggatcgggaaaaagcgtctgcatcaataccattttggtcagtctgctttataaggcggatccgagtgatgtcaaaatgcttctgattgatccgaaaatggtcgagcttgcgccttataaccaaattccgcatttggtcagccccgtcatcacggacgccaaagccgcgaccgccgcgttaaaatgggttgtggaagagatggaacggcgatatgaactgtttgcccattcgggtgtgagagatatcggccgctttaatgaattaaccgccgatcataagacaggcgaaaagcttccgtacctcgtagtggtcattgatgagcttgctgatttaatgatggtcgcgccgaacgatgtggaagaaagcattgccagaatcgcgcagaaagcgagagcctgcggcattcatctgcttgtcgcgacacagcgtccgtctgtcgatgtcattaccggaatgatcaaggcaaacataccgacgaggattgcattctccgtctcaagccaggtagattccagaacgatcatcgacatggcgggagcggaaaagctgctcggaaaaggcgacatgctgtactgggaaaacggtaccggaaaaccggtgcgcctgcagggcaactttgtatccgacagagaaattgaccgcgtcgtctctcatgtcagaaagcagctgccgccttcttatttgtttgaacaggaagaactgatcaggcagggaaccgccctcaaggaagaagacgaactgtttcctgaggcgtgccaattcgtcgtggagcaaaacagcgccagcacctcaagccttcaaagaaggttcagaatcggttataatcgcgccgcgaggctgattgacatgatggaagccgaaggcatgatctcagaagcgaagggcagcaaaccccgtgaagtgctgattacggccgctgacattgctcaagaataagaatatcgttcatttttctcacaaacatggtatgatagtggatggaccatcaaaactgcatcactgtcacgcgctgaaatatcatgcggcaggtttaatcaaaaagaaagttacagatactgacgataacgtaaaaataaatggaagcgccgctgtgcgggcttttcgcccgcggcggtcgcaaaatgaaatgagcgtcatatactggggaacagatagacgtttgttggaggtacgattatgactgtttatcattttgttggaataaaagggacaggtatgagcccgcttgctcaaatcctgcatgatacagggtatcaggtgcagggatcggatatcgagaagcagattttcactcaggctgcccttgaaaaaagaaatatcccgatctatccgttcagcgccgataacatcaaacccggcttaacggtaatcgccggaaacgcattccctgattctcatccggaaatcgcaaaggcgctcgctgaagggattcctgtcatcagatatcataaatttttagctgaatatatgaaaaaatacacaagtgtcgcggtaacgggcgcacacggcaagacgtccacaacgggcctcttggcacacgtgatgcagcaggcgaagccgacttcgtttcttatcggggacggaacgggcagaggaaatgaaagcagcgaatactttgtatttgaagcctgcgagtaccgccgtcatttcttaagctatcagcctgattatgcgattatgacgaatattgattttgaccaccctgattatttcgccaacattgacgatgtgtttgatgctttccaaaacatggcgcttcaagtcaacaaaggcatcattgcctgcggtgatgacgagtacctgccgaaaattcacgccaatgtgcctgtcgtttattacggcacgggagaagaaaatgattttcaagcgagaaacatcgtgaaaaatacggaaggcacgacatttgacgtctttgtccgcaatacgttttacgatacgttctacatcccggcatacgggcatcacaatgtcctcaattccttagcggttattgcgctctgccactatgaagagatagacgtgaacatgattaagcgcggacttgaatcattcggcggcgtcaaacgcagattcaatgaaaaagtgatcggcagccaggtactgatcgacgactacgcccaccatccgactgaaatcaaagtcacgattgaggcggcgcgccaaaaatatcccgaacgtgaaattatcgcggtatttcagccgcatacgtttacacggacgcaatcattccttgatgaattcgcagaaagtttaagcgcggccgatcgcgtgtatctgtgtgacattttcggctcagcccgcgagaacgtcggcaagctcacgatcacggatcttcaggaaaaaatcgataacgcagaactcattgaagaaaatgacacatccgtgttaaaagcgcatgaaggcgcagtgctgatcttcatgggcgccggagacattcaaaaatatatgagagcctatgaaaacgtcatagcgtaacgaaaaagcagtggggctctcactgcttttttgcgcgtgctgcaaagggatttaccgagaaacggagaaatagtatacatacagatctttcatatatgtttatcattttaagaattgggtatataccactatatcctgcattaaggaggtattagatgatcatcattctttacttaagtgtcgcactcattgccgttgcatttctcatcctcgtcatctatctgtccaaaacattaaagtccgtgcagatgactttaacaaacgttgcctcgactttagacggccttgaagggcagatgaaaggtattaccgcagagacaaccgagctgttacataagacaaaccgtctcgcggaagacattcaggaaaaatcagagaaattaaatacggttgtccatgctgtccaggaagtgggaacttccgtccagcagtttaatacatccataaagcaggcagcaggttccgttacggcctctgtaagagagaatcaggataagatcagtcaggttgtcacctggagccaggccgctatggaaatatgggacaagtggaagcaaaagaaaaaaacatcgctttaatcataagaaaaatccactaaggaggaatcataatgagcaaagatggaatcaatagtaaggattttttaatcggaacgctgatcgggggaattatcggcgcgacaacggcgttgtttctggcgcctaaatcaggtaaggagctgcgcgacgatctcggcagtcaggcttctgcgttaaaggataagacggacagaatgacggccgacgcgaaagaaaaaggctctcaatatgtcagcatcgccaaggacaaaacatctaatatcacccagctggtagctgatcagtcaggccagattatgaataaagtgaaggatttaaaagaccgttctaagagcacactaaccgagaaagccgaagagacgagaagcgaaatgcaggacacggcccaaagcatcaaggccgaagcggaagacgccggggaaaaagccggtcaggcaaatcgctgatcttcaataaggagagataaccgacatgacaaaacagctgatatcgtctgaagaagagttcaaaaatgccgctgagaaagaaaacacgctcgtgtttttgaaacacagcacaacctgcccgatcagccaagccgcgtttcaggagtttgacgcctttgcatcggcgcattcggaagtgccttcttattacctgcaggtgcaggacagccggccgctttcaaactatatcgccgagacatacggcgtgaaacatgaaagcccgcaagtattcgtcattgcaaacggcgaagtgaaatggcacgcgtctcattcacaaatcacaaaaaacgcaatagagcagcacctttcataattgctggccgccggttgataccggcggtttttttttttgaaaaaaactattgatcatttcagccggatcatgtaggatatcaatatatactgcttcaacgcataaaagcttaaaagcgttttggtgataaagccgaatgtgaaaaaatttattatttcatattcctattttcgcataactgtagtaagatgcatgttaaccattaaaataaaacatagcatagaagggatgaaaaagatgagcaacaaggaattagagagcctaagacagcaggcagacgcactaaacttagaaatccttaaattaatcaatgaacgcggagccgttgtaaaagaaatcggtaaagcaaaggaagcacagggtgtcaaccgatttgaccctgtcagagagcgtacaatgcttaaccgcataattgaaagcaatgacggcccatttgaaaactcaacgatccagcatattttcaaagaaattttcaaagccggacttgaacttcaagaagaggatcacagcaaagcgttgctcgtctcccggaagaaaaaagcagaagatacgatcgttgatattaaaggtgaaaaaatcggtgacggcgatcagagattcatcgtcggaccttgtgccgtcgaaagctatgagcaggttgccgaagtcgcggccgcagcgaaaaaacaaggcattaaaatcctgcgcgggggcgcgtttaaaccccgcacaagtccgtatgatttccaaggtctcggcgtagaaggcctgcaaattctcaaacgcgtcgctgatgaatatgacctcgcagtgatcagtgaaatcgtaacgcccgcccacattgagcaagcgattgattacattgacgtcattcagatcggcgcgcggaacatgcaaaactttgaattgctgaaagccgccggttccgttaaaaagccggtattgttaaaacgcggtcttgctgcaacaatttcagagttcatcaatgcagctgaatacatcatgtcacaaggaaacgaccagatcatactttgtgagcgcggaatcagaacgtacgaaacggcaacgagaaacacactcgacatttctgccgtgccgattttgaaacaggaaactcacttgccggtgtttgttgacgtcacacactcaacaggccgccgcgatctcctgcttccgacagcaaaagcggcgcttgcgatcggcgctgacggcgtgatggccgaagttcaccctgatccttccgttgccctttcagactctgcgcagcagatggatatacctgaattcgagaaatggctgaacgaattaaagccaatgctgaaagtaaaagcataatacaacgttccgctctttaaaggccgccacgcgcggcttttttttcgtatcttcattttatttaattataaaatgaaagtgaacgttttcatcactgggaaaaacgtgtataatttcatgagagatatttaaatttgatgaataatgaaaaataatgtacactactgacttacgcttacaatcataaacgacagaatgcgaaatcgtacgacatttctttacataaagtgtttatgctatagataaggataagtgtatccagtaaaaggagtggtttcagtgagcaacattacgatatacgatgtggccagagaagcaaatgtcagtatggcgactgtttcccgcgtcgtgaacggcaacccgaatgtaaaaccgacgaccagaaaaaaagtattggaagccattgatcggctcggctatcgcccgaatgcggtggcaagagggcttgcaagcaaaaaaacgactacggtcggcgtcatcatccctgatatctcaagcattttctactctgaacttgcgcgtggaattgaagatatcgcgacgatgtacaaatataatattattttaagcaactcggaccaaaatcttgagaaagaactgcatctgttaaatacgatgcttggcaaacaagtggacggtatcgtatttatgggcggcaacattacggacgagcatgtcgaagaatttaagcgctctcctgtgccgatcgtcttggcggcatcagtggaagaacagggcgagacgccttctgtcgccattgattatgaacaggcgatttatgatgccgttaagcttttcattgataaagggcatcgcgatattgcactcgtctccggaccgatgcaagagccgatcaaccgttcgaaaaaactgcaagggtacaaacgggcgcttgaagaagcggcgattccgtttaacgagcaattcgtagcggaaggcgattacacctatgattccggtatggaggcgcttcaaagcttgatgggccttgaccggaaaccgacggcgattctttctgcgacggatgaaatggccctcggcattatccatgcggcccaagatcaaggtctttcgattcctgatgatcttgatattatcggttttgacaatacgagattgagcctgatggtccgccctcagctttcaacagtcgtgcagcctacgtacgatatcggcgccgtggcgatgagacttttgacaaaactgatgaacaaagagccggttgaagagcatatcgtcgaattgcctcaccgcatcgaattaagacaatcaaccaagtcataaaaaaacggaaaagcaagcttcactctgaggggtggaatcttgcttttttacttgagtaaggagaagatatgaaacgttttgattatctgacgcccgttggctttatgttaggctgtattattgtcgcaatcggtattctgtcagggacgggactggcgggaatcagttcatttttagatctgacttcttttttaatcgtcacaggcggccttgctgcggcgatctttatcagctttccgccgagggatttaaagaaaaccccttctgttctgaaacaggtattctcccgtcaggatgacaatgtgaaagagcttgtcagagtatttgtcagcctttcggagcaggcgcgcaggcaggggctgctgtctctggatgaccaggcgcgtgagatcaaggatccgttttttaaaaaagggcttttgcttgcgattgacggctgggacgaggaaacgatccggctggtgatggattctgagatcgccgcgatggaagaaagacacagaaaaggaagacgcgtttttgaaaaagccggtgatttcgcacccgcctggggaatgatcgggacgctcgtcggactcgttctcatgctcaaaaacttaaatgacccgcataccctcggaccgaacatggctgttgcgctattgacgacgctgtacggagcgctgcttgccaacttggtgtttatcccaatcgcggcaaagcttgaagaaaaaacggaaagtgaaattttcatcaaacaggtcatgatcgaaggggttgtcggcatccaatcgggcaaaaatccccgcaacctcgaaagtcagctcgtcgtcttcagctcaagagaagactggcgtaaaggacagcctgcgaacaagaaaaagggcgctgtccatgaagcttagaaaagagcgttttgaaagaagaaacaaaccggaacattccggcggttcaccgagatggatggtgacgttcgctgacttgatcacgctcattctcgtgttctttatattgcttttttcgatgtcgcaaatagacgcggaaaaatttcaatctgccgtttcatcgattcatacaaacggcagcgggggtgaaccggcgtcatcagacaaagcaaacgaaaataaagaacaggatttgctgttacaaaacgtgaagacatacataaaagcgcatcatttgagttcgaaattgacggcgaagcgcgatgagcgcggagtggttctggtgctgcaggaggccgttctgtttcagacgggaaaagcggatgtgctgaaaaacgccgagccggttctgcatcagatcgcggtgcttttaaaaacaattccgaatgacatacaggtagaaggccatacggacagccgccggatttccacctatcaatttccgtcaaattgggagctgtcgtctgcaagagcggcgagtgtgatccggtattttaccgcgaatgaagacttttccgccaaacggtttatctctgccgggtatgcggatacgaaacctgtgaaggacaacaaaagtcccggacatatgaaagaaaaccgccgtgtagaaattgtgatcaaaaaaacgacctcctcataaggtcgttttttatttagtcttataccgctgctcagaccggatggcaaaaagtgctttttccacggtttgggcatttttttctgaaatttcttctttgcggggaatcggaggatataattgttcaggatcactccaaaaagcgggcaacgtgcagggggagtgcttctgccatttatcaatccatttctgcggtatgcgctccccgggatcaatccctttcatctcaagccaaatgcggctccatgctctcgggacgactctccaaatatcgtatcctccgccgccgaccgcgatccatctgccgctgcaatattgatgggctaatgaatgagcgagccgcgggatctcctgataaatggagattgtattggacaggtgtgtcaatgggtcgtaataatgggcgtccgcaccgttttgggtaagaatcacatccggcttgaaaaaagccgcgatttctgaggcggccgtattgtaagcgtgaagaaaggaatcgtcctctgtgaaagcgtccagcggaatgttaaaagaatagccgtagccttgcccgcttcctttttccagtacctgtcccgtcccgggaaataaataacgcccggtctcgtgaaaagaaacagtgcagacatcagacctgtcgtaaaacgtaaattgaacgccgtcgccgtgatgagcgtctgtatcaatgtataacacttttgccccgtagttcttctggatgtattggatggccacggcgctgtcattatagatacaaaagcctgaggccctgccgcggaagccgtggtgaaggccgcctcctaaattgcaggcgtgccttgcttgtcccgtcatgacataatcagccgccgttaaggtgccgcccaccagaagtgacgcggcttcatgcatgccggcaaaaacgggggtgtcttccgttccgagaccgtagctttctccttctgcggcagggagccggcccgcacccgctagttccaccgcctgtatataatcctccgtatgaacgagagccagctcttctttagcggccgcgcgcggtgtgacgatatctccttcgtcaaacgcatccgccgcctgaagcagatcgtatgttaaaagcacacgacgctgattgaacggatgttcctgatgaaattgatacgtctgataagaaggcgagtaaacaaaaacgctgtctctcatggctgatccctcaaatgtttcggccataagacattgtatccggcttcttgaacggcacggataaaagggagcggattcatcgtcttcacccggaagacgagaatgttcgacccggcggactcatggggatagacgagcacactcaggatttgcagctgaagatcacggcacatgcagctgagatcagcaaggctttttgtcatatccgtcaccaggatttccacctgtgatcccggctgggccgcgcctgtcaggctgacgaaagtccggagcacgtcggttttcgttaaaatgcccgtcagcttatggtttaccgtaatcggcagacagccgatgccgtgctcataaaaggaagcggatatttcttccacaaagtcaagcggatgggcgcagatgacattgcgcttcataatggtctccactttgtttgtcagaaacgcgccgcgttccttttgttcaaagctgccggggccggcctgtttaatgtctctgtctgtgacaataccgatgacgtgcagctcgtcgtcgatgacagggagatggcggatatgatatatcttcattttacggacggctgtttcaatggagtcgtgttttgagacggtgatgacgtcccgtttcatgatttgttctgcaatcatctttttatcccctttgtatgtcagtcaatacataaatcgctgataaaaacgaagcctgtcgaactgttcaattgactcctgactgacgtgcctgccgatgcgggccatcagacaattggccggatgagagctgatttccggttcatccgttgcgaaccagacaagacccccggcattcatcatcttttccatgatctttctgtattcccacacatcttttttcattccttttaaatcccaatgccagtaatattccgtcgtcatgatgatgtaccgttccatctgttcatccatcatgctgactgtcagcaaagtttttccgacagaacagcccctgtagccgggagcgacctcgatcgccccgagttcaaggaggtcttccatatttccgtcagaccatcgttcaagcggatcaggatataaatacgtcacatagccgataatcgtctgtccgtccctggcaataatgatccgaccttcaggaagcccggcgatctcgattaacgctttgtgctgttcatgaggaaggcgaaaggctgtcaggccttcatgaaactcatactgtgctagatcccctggaggaacgggcccttctactaaaagagggccggctgctgtctgaattgatgaagaatggtacgttttatgatgtttcactgattcaccgcctgtcggttcttaataaaaacacatctcttttaagcataacaaaatataaagcgttttcaatagtgttgtaatttatattttaaaaattgagaaaactgtgaacatctactataattagtctatagataagcaaagggggatgttgcatgaatttgaaagcgttgccggcggaaaaggggaattatcatctgcgaaattatgaggaaacgtaccgcagcttcgattggaaagaggtcgaagcggcattttcctggcatcagacggggaagctgaatgcggcgtacgaagcgattgaccgtcatgccgaatcatttcgaaaaaacaaagtagcgctatattacaaggacgcaaaccgggatgaaaaatacacatttaaagaaatgatggaggaatcgaaccgggcgggaaatgtactgagacggtatggaaacgtggaaaaaggggaccgcgtttttattttcatgccgcgttcgccggagctttactttatcatgctcggcgcaattaaaatcggtgcgatcgccggtcctttatttgaagcgtttatggaaggcgccgtcaaagaccgcctcttgaacagccaggcaaaggttgtcgtgacaacacctgaactggccgaacggattccggcggacagcctgcccgacctcgagcatattttcattgtcggcggcagcaaagaagcgggagataaaatcattcattatgataaagcggctgagggagaaagcacgagacttgatatcgaatggatggacagaagagacggctacctgcttcactacacatcaggatctaccggaacgcctaaaggtgtgctccacgttcatgaagccatgattcagcaataccagaccggcaagtgggtgcttgatcttaaagaagacgatatttactggtgcactgcggacccgggctgggtgaccgggacggtgtacgggatatttgcgccgtggctgaacggagcggcgaatgtgatcatcggcggcaggttcagtccggaaaactggtacggcacgatcgagaagctcggtgtcagcgtctggtacagcgctccgacggctttcagaatgcttatgggcgccggagatgaaatggcatccaaatttgaccttacttcacttcgtcacgtcctgagtgtcggagaacctttgaaccccgaggtcatcaagtggggacataaagtattcggcaagcgcatccacgacacgtggtggatgacagaaacgggcggacagctcatttgcaattatccttgcatggagatcaagccgggttcaatggggaaaccgattccgggagtggaagcggcgatcgttgacaatcagggaaatgagcttccgccgtaccgaatgggaaatctcgccattaaaaagggctggccgtcgatgatggattccatttggaacaataaagagaaatatgattcttatttcatgccgggcggctggtatgtttccggagattctgcttatatggatgaagacggttatttctggttccaaggcagagtcgatgatgtcatcatgacatccggcgagcgcgtcggcccgtttgaagtcgaaagcaaacttgttgaacatccggcgattgccgaagccggcgtcatcggaaagccggaccctgtccggggagaaattattaaagcgtttatcgcgctcagagaagggcatgagccatccgatcagctgaaggaggacattcgcctctttgtaaaacaggggcttgccgcgcatgccgcaccgcgggaaattgaattcaaagataaacttccgaaaacacggagcggaaaaatcatgagacgtgtgctgaaggcgtgggagctgaacctgccggcaggcgacctgtccacaatggaagattaaagacggcgttgacatcgtatcttatttatgttaaaaatgagtaagcttcatacgaaaaggttttgattgagacaagtaggatatctgattgttcaagagagctgatggccggtgaaaatcagcacataagatatgccgaatacactcatgaaccgcttttgcgaacaaagctattccaaggctttcagtagtgaaagaacggacacggtccgttatcaaaaagagtgataaaagcttttttatgcttttattagtagggtggtaccgcgattatatcgtcccttcgttttaaacgaaggggcgttttttattttcataaacaaaggagcagacaaaatgactaacttattagaggatttatcattccgcggcttaatccagcaaatgacggatgaagaaggactgaataaacagctgaacgaagaaaaaatccgtttatactcagggtttgacccgacggctgacagcctgcacatcggacaccttctgccgatattgacactgcgccgtttccagcttgcaggccaccatccgattgcgcttgtaggcggcgcgacgggactgatcggcgatccgagcggcaaaaaagcggaacgtacgttaaatactcaggatatcgttgtcgaatggtcgcaaaaaattaaaaatcagctttcccgatttttagatttcgaggccggagaaaaccccgctgtcatagcgaacaactttgactggatcggaaagctgagcattattgaatttctccgtgacgtcggaaagaacttcggaattaactacatgcttgcgaaagatactgtaagctcaagaattgaaaccggaatttcttacacggaattcagctacatgatcctgcaatcctacgattttctgaatctgtacagagaaaagaactgcaaactccaaatcggaggcagtgaccagtggggcaacatcacggccggtcttgaactgatcagaaaatcagaagaagaaggggcgaaagctttcggtcttaccattccgctcgtcacaaaagctgacggcacgaaattcggcaaaacggaaggcggcgccatttggcttgataaagaaaaaacatcgccgtacgaattctaccagttctggatcaatacagatgaccgcgacgtcgtcaaatacttaaaatactttactttcttatcaaaagaggaaattgaaggttatgctgaaaaaacggagacggctcctgagaaaagagaagcgcagaaacgtctcgctgaagaggtgactgttcttgtacacggccgcgaagcgcttgagcaggccgttcatatctcccaggcgctgttcagcggcaatattaaagagctttccgctcaagacgtcaaggtaggatttaaagatgtaccttcgtttgaaaaagaccgctctgaagaactgtctttagtagacgtgcttgtggaatctaaattgtcgccttcaaaacggcaggcccgcgaagacattcaaaacggagctgtttacattaacggcgagcgccagacggacatcgggcatcttctgactgcggaagaccgcattgaagatcaatttaccgtactgcgccgcggaaagaaaaaatacttcctgatcacgtactgaaaataaaaagcagtccggccgctcaatgcggcaggctgcttttttatgttttgtgaatactgcacggggaaatgagtacagtacatagtataagcaaaacagggaaggggtgctgcgccgtgaatttcatgtttaccatcgcaaaagaaagattgcagcgggatcattgggaacagcagcaaagcataaacgccgaagccaaagccgaggaatcagagacggaagaagaaaatccgacatcataaagggaaagcccccattctgcggaatggaggcttttgattgtcaccatatcagcctgacggcggccatcagcacgactcctgtgatgaccgtgatggataagctttttgtccgtatcgcgcaaagcaatgtcgggatgagaacgatcattgctttccaatcaaaggtcaaagtgctgtttgttttcacaatcatgctttccgttaccagagccgtcaaaatacaaagcggaataaaggagagccattttaaagccaactcaggcatctgaatgttccggacaaatataaacggaacaatgcgcggcacaagtgtaacaatcatgcagccgagtataatccagatcatttgtgtgctgatgctcatttgtccgtcaccaccccgatcgttgccacaatcacggttgagacgatgaccgcgatgtgtgacgggacgaaatacgataacaagaccataaaaatgatcatatagagtattaaggataggttgtgcttcagcttttccgaagtggacgattgcaattgcagcacaagcagcgccgcaaacatagcgggcaaagcaaagtccaggccgagcgcgtaaggatcagatatccattgtccgagaagcccgcccatcacgcaggaaataacccagcacatgtaagcggttatattgaggccgttcatccacttatcgtataacctgccgttctgagccgctttgttcaccgctaccccgaaagattcgtcagtaagcaaagccccgaagccgatatttttcgccaaagagtatttcgtgaaatacggcgcgatggtcaggctcagcagaaggtgccgcagattgacgataaacgtcgttaaaataatggcggaaatcggactcccggaaacaaggagcgagcaaataataaattgggcggcgccggcatagacacacaaagataacaaacaaatttcaagaatgcttagatgagaggcaacgccaacgatgccgaaagcaaaaccgatgctcatatagcccagcagcgtaggcacacaatcccgcaccccctgtaaaaacgtatcgttcatttcccgggaaacggcggttttttgcacttctgtgttaatcattttttatactcctttcatagagattataatgataacgactaatgaaaaaatcaaagaaaatacggttcacatttatatgaaccgatttccggtgacgacatgaaataacgaatggttttgtttcatcaggccttcaactttctcagccccgacttctttcacaagctccgcgaacatcagatcgtgcctcatatattccatggccacgagaacgagagcgggatcttctgatttaatggcccaggcattcgtctgcggagaaaaattggcgattaagacttctttattatcgcgggcagctatcgttaatcttccgcccatccgtttctccgccacttcaggtgacatattatgatttgtcgtatttccgagcttcacttccggagggccgaacacaatcgaaaagacgggcaattgttcggcggcgcgtttgttagcagcttcttgaataaagggaatctgctgttcccagacagacagccacaactcttcctcggctttttcaatcatatccttcatctcattgatgacatgatcattcgtgctgatgcggcggatgacattcatctcctgctcgctttccagtgccaataacttttcctcaaggtagccgaatgagctctcgaaatcgtgccggagccggtcgattaattcctttccggcaagcggagcatatgtaaccggatcagacggcacaatatggacagcgcctttatcaactaatttccccaatacttcatagatcattgagcgggggacgcctgaccttttgctgatttcatatccggtaacaggcgagtgtttcaacaagccgatatatgctttacattcatattgagaaaatccaaacttctgtaattctttcagaacatcctccataaacatcctccgtagtggttattcatgaaactactataatgtaagcggttatatcttgtcaatgggacttgagtgctgaaagaaaggtgcgcctgttttgtcgctttccaacttagtttatggtgagttacatgtatggcttttgtgaaaaacgttgccgtagacccacacgaatgccgtttgatacgataaattcaagaagttaaaaagaggaggatcacggtggaaaacacctctaaaatcgcttttttatcggttataagcaattccctggtcgtcatgctcaaaatagtggtggggatcataaccggatctgtcgcgatactttctgaagccattcattcttttttagatttgatcgccgccttcattgcctttatctccgtcaggatttcaaaaaagccggctgatacagggcatccgtacggtcatggaaaagtcgagaatctgtcggggactatcgagacgattctgatttttgcggcagggatttggatgatatatgaatgcgttcaaaaactggtgaacccggcgccggttcatctgcctgtattgggaattgttgtgatgcttgcgggggctctcattaatttgatcgtttcgaagttcgtaaaaagagaagccgaaaaggttaattccgtggcaatgaaatcaaatgccctgcatttactgactgacgtgtacacatcattaggcgtagcggcaagccttttggtcgttaccgtaacggagtggtacatacttgatcccattataggtatggtgctggcggtgtatatcatatatgaagcgtttaagttaatgaaagaagcattcccgccgctgattgatacccgtttgtcggaagaggaagaaaaaacaattttaaagattattgaaacatttcaacaggaatttattgaaattcacgattttcgtacaagacgctccggcccgcaggagtatattgattttcatctggtcgtagcctctcacgtgacgattaaagacgtgcatgacctgtgtgaccgcattgaaagagatattacgaatgaattcaaacaagcacaggtaatgattcaccccgagccggagagcgagaggaagaaataaatcgatcttaagtttgcgtttgttcccggcaaaatgcctgcaaaaggcccgttcccacgggtctttttgttgtataaatgactatttctcgctcatatgagagataagcttatacacgtgaggggttcatttcatacgttatgttgtaaagaaaaagggaggtgaacagaattgaacgctatttctgttaaagaaattgaacatggagttgccgttgcggaaagagaaggtttaggggagtatttataccaagaaccggtttctaaaaaatgttcgcgccgttcccgcagcagaaaacggacacaccgttctcgcagcagaagacggacgcatcaccggacacaccgttcccgcagcagaagacggacgcatcaccggacacaccgttcccgcagcagaagacggacgcatcaccggacacaccgttcccgcagcaaaagacggacgcatcgccggacacaccgttcccgcagcagacggtctcatcaaaaacgtagccgcaaacgctgttttaaatgctgactgcagactctattacaagtaacggggatctgctataatggcaagagaactgcataaaagatccagtatcatcatctgcggacactgaactgacaacatggcgctgtttgttcgtgtccgttttttatgtcaaaaaagatgccggaggataaaaaggaagggatgacgccgaatgaagctgaatgaggatttttataactctgaaggaaagacagtctctttgccaaacatcagcagcaagcttttgcatatcacggacagcgggcatatcagcgttgacttcatcagcataagcaggctgcggaaggcttcaaaaatcgcgatcttaggtgacagcgtcgcccgggggctgcgtgcggaatacggctttggtgacattctgaaagaccggacaaacgctgaaataaccaatctgtctgtcagcggcgttaatatgagcaacaacggaagcgataacatttatcagcaggcgcttaaaacaaagggacatgatgtcatcattgtccagggaacagatgatgattggtgcaaccacattcccatcggcacagatgaaaaggatatcaccacattttacggaggcttctgccaagtgatccagcagctgcggagcggaaataaaggcgcgagcatcattgtggtgaccccaacgagacaagcaaaaatgtcaaaaggaaaaatcgtccgccgtgatactgataaaaataaactgggcctgaagctggctgactatgtgaaagcccaaaaagaagcctgcacactcctctctgtaccatatgccgatctatttgatactgatctcatcgacccatataatcccgctttccgcagcatgtgcatgtcagaaggtcttcatccgaacgagaaagggcatcaaatcatatttcaggaaatctgccggaattattattactattatgggtaacacagcgctaacagattattttcggctttgcttttctaaaagctcaattattctttgagatgcgtgtttttgcgctctcaaaagcgagacgatattaccggtaaaaccgattaaaatgataagcagcaaaatgatcatccacatagcgaacctcctgtcgagtgttgaaaaacccactctttattttacttattatggatggggagagaataggtctaactattgggatttctttataaatccataaaaaaatgaacagactgaacgggtctgttcatttttattcgcttatttcagcaggttcaatgattcgcgattaaaggcttccaaatcgtcaggtgttctgcttgttacgatgttatggctcacgacgacttcttcatctttataatgtgcgccggcattgattaagtctttgcggatgctgcggaatcccgtgatatcttttcctttaagaaggtcggtatcaatcagcagctgcgggccgtggcagatcgcgaaaacgggtttctgattttccacgaatgctttagtgaattcacccgggcggtcatctccgcgcagaagatccggtgaaaagcctccgggaatcaataacgcatcgaattccttggcgtctgcgtctgagatcgcttgatcgatctttactttctcaccgtgcttgcccgtcacttctttcccagcttccaaatctattgtcaccacactgtggcccgcttctttaaatgcttccgccgggcttgtatattcaatatcctcaaattgatctgtcatcagaactgcgatttttttgctcatacatcatgcctcctgtgaatttgtatatgacaagaatatcaggcagattcccgcctcacaacgtatttgcttatgaaaaaagacccctctgaaaaagaggagccaaaaggtacggaggtctgcttaaacttacgtgtttaacctgagataaggcaagaaatcgaaccaattactttttgcgtctttttttctgctttttacacccgcatttccccggatcgcccggatcaatgacttcgtgaattgtttcttccttataaacgtggcggggaacataacggatatgctctctgttaatgtgtttgatgggatggacgtaaaccacttctttgtcagtatacttgtcagtcacaatatacttagggtcacagtaatacactttcgattttttacccattcatctcacctcccgtactttattaaatgctgacaaggaggattttgcatcggacaagtacaccatggcaagtccacaatttttcagctgcaatttcgtttttctgatttttcctgaatccgcctcaaattggaacggctaaccctttttgagcggggaaatctataaaaaagaattcaaaaacgattcttttctcaggtcaatcgagatgcatacatctttagggggatttcagaatgctcgatgaaaaaacgattgaaatcattaaaagcacagtgccggtcttagaagagcatggtgaagaaatcacaggccgattttatgacctgctgtttcagcatcaccctgagctgctgaatatctttaatcagacgaatcaaaagaaaaaaacacagcgtacggccttgtcgaatgctgtgattgcagccgcagccaatattgaccggctggaaaacatcgttcccgtcgtcaaacaaatcagccataaacaccggagtatcggtgttaaacccgagcattacccaatcgttggaaagtacttgttaatcgcgataaaggatgtgctaaaagacggggctgctcctgaggtcattcaggcatgggaaaaagcatacggcgtcattgcagacgcttttatcggaattgagaaggacatgtatgaacaagcggaaacgcaaaaaggcggctggaaagactataaggcgtttaaaattgataaaaaggtaaaagaaagcaaggagataacgtcgttttatttaaaaccggaagacggacaagttctccccgagttcaaagcgggacagtatatcagtgtaaaagtatacattccggacacgggttatacgcatatccgccagtacagtttgtcggatgtatccggtaaggattattacaggatttccgtgaaaaaagacggaattgtttcttcatatctgcatgaccaattacacgaaaaggattcaattgagatcagcgctccggccggggatttcgtattagaccctgattccaaaaagaatctggttctcatcagtgccggtgtcggaattaccccgatgatcagcatgttaaagacggttgccaaaacccagccgcagcgaaacgttctctttatccatgcggcaaggagcggagagtatcatgcgttgcggcatgaagctgaagaagccgcggaacactcatccgttgacaccctctttatttacagtgagccgtccgaacaagaccgttcagaaaacattcgttttcgggaaggccggattgacaaacagctgttagaagaagtgatgacagataaagatgctgatttttacctgtgcgggtcaccgtcgttcattaaagaaatgaaaaagctgatttctgaattcaatacaccgccggaatccattcactatgaattatttgaaccgcagctgagtatggtgtgattgaagaaggaaggacgatgattttaatgtatgaagcatccggactgggtgctttttttattctcttgcaaggaagggttgctgaggaatcactctgtagaggaaaaccactttttgtctcaactcgcttaattatcgaatgaaataagtgccgcatgttaaaaacacatggcccgcgagtttattgctcacttatcctgctgctcggatttttggtgtgtgagaaaaaaacggtacggctgcataatccggaagagacgctgaccttttacttgtaaaagaagtttaaagacaggatgaacgcttatttgctagtgtacgagcggcaaaagcaaaaagaggaatcagtattttaaaattaaaaataacaactgatagaaatgaaagtttcaggatacaatgggatttatatattcgggttttgtgatagcagtatagggaggggaataatagagtgagtaacttttttgaggaatcggtacagggaggggttgtatctatgcttactgatattaaacaaaaggtttggggatgctcttttatctgagaatcgatttgagatgaagcggggatgccgaggggatcagagggcgaacgtcaggcagaattacgccaagtggaccgccgagaaaaatggctctggaaatgtgaatctattgttgattttcttgattgagctactgaagaaatagttgacgagaaacaccggactgtctttgtagtagacggggtgaaatatcgtgaaatcgctctgcattctggcgtttcccgcgaaacggtcagacgcatcaaagagaagattttttgccaaatatgtaatttttattgttgaaacagataaaatccgcagtgtagactggaaggcaaaatatttctgcgtccccatcgattcaaatagggattacaataatgtgaagagttatttataaacagaaattgataaataatataagatcagctgacaaacttaatgaggatcaaactagtgctcacttatttataaattaaacatattataatgatatattaatcattaagggagatgagcagctgatgggttatgatcagcatagaagatgccctaaatgtaaacaaaaactaccgaaaccaaactgctgtaagtgctgtcccatctgttatacaaaagttattgtaggacaacgaggattacgaggggtgcgagggattccaggggttacaggaccagccggaccagccggaccagccggagcgaccggggccacaggagctatcggtccagccggagccacaggagcgaccggggtaactggagcggcgggagtcacaggagcgaccggggccacaggagatatcggtccaaccggaccagccggagccacgggagcagccggagccacgggagcgaccggggtaactggagcgaccggggtaactggagcggcgggagtcacaggagcgaccggagatatcggtccaaccggagccacgggagcgaccggggtaactggagcgacgggagtcactggagtgaccggagccacaggagatatcggtccaaccggagtcacaggagccacgggagcagccggagccacgggagcagccggagccacgggagcgaccggggtaactggagcggcgggagtcactggagtgaccggagccacaggagatatcggtccaaccggagcgaccggagccacgggagcgaccggagccacgggagcagccggagctaccggagcgaccggggtaactggagcgacgggagtcactggagtgaccggagccacaggagatatcggtccaaccggaccagccggagccaccggagcagccggagctaccggagctaccggagccactggagcgaccggggtaactggagcgacgggagtcactggagtgaccggagccacaggagatatcggtccaaccggagcagccggagccaccggagccacgggagcagccggagccaccggagccacgggagcagccggagccaccggagccacgggagcagccggagctaccggagccaccggagccactggagcgaccggggtaacaggagcgacgggagtcactggagtgaccggagccacaggagatatcggtccaaccggagccaccggagccaccggagcgaccggggtaactggagcggcgggagtcactggagcaaccggagccacaggatctgggctatcagaatatgcttatgtgtacaatctaagtgcagaaacggtagctatagaggctccggtaatttttgactcaactggaatcactactgctggcattacacatgcccctggaacagctcaaattatagtaaccactccaggagattacgaggtcactttttcagtctcgggtgtagagcctaaccaattcactttatttgtaaatggagggccggtgacgaacacagtttacggttcaggagctggtactcaacagaacaatggtcaggccataattactctagcagcaggtgacattcttactcttgtaaatcatacttctgcagcagcagttactcttcaaactttagcagggggaacgcaaacaaacgtaaacgcttctattgttctcaaaaaattaaattagataagtggtttaaatctccatattaaacaagaaatgagaatgacttaaaaaagcttatagagcttaatatacagctttagaaggatgaagaaatttaaaatataagcaaactcatctaatttttttatataaggtattatggtaataggtaataaacaggcaggcgctttcccgcaggggagggtgctttaaatttaaggacaaaagcctccaactgttaagcgagtcaacacagtaggaggcttttctcttatgggtggtacagcagcagtattctcttacaaatcaaatattcccagaaagttatggcagtattcgtctctcgagtaatgaaaaaagttttatgttctctgtaaactgcgtccggtaaatctcgggataaacgattggcggttaacgactgagtacgggggcagtttagaaagaatatgattggagggattacataaaataattagtcaagccttagaggaattaggaaagaatgtgaggtgtgcggctgaaagggtgccaaatctcaaccctgttattatccataaaaaagacatggcagcgcaactacaggaattcagttcggatttaggcttgtcagcagatctccatcattgcctagataaaaaggtaaagaacttattaacggcgtatatggctcacaaacggcatatgcaatccatgattcctgacggcatttagggttaaaacaaaagcaaagcgcgaatctctactaaacagttactttaggacttctcaaaaaggaactcctattaaagggagcagggttaattttcaaattgtttaaataaaagtaaaaatatagtatgttagaccagaaaacaaatgaaggaggatttgtatgaggttgttaaaaaactcaatctgtttacttgtcgcaactctattgtttgctattggattttcgccgcaaacgaaagcaacacaagagcactcgtttggattagcaaaaccagtaacctttgaagaaaaagaaactttaacagtaaataagaatggagtggctaagagcaataataatggccaggcttccgtcattaaggaggcacgacaacttgccaaacaggatagccacaatgaaataacctataagagccccttagctaaagaagaaaacaacattgttaatgtgccagtcgttgagaaaaaagaagagaaagcgcacactaaagcagctagcttagttacgatgtcctacacaacaatatatgaccccaacaaaaaatccacacaaccacaattaaaatagcaagcatagttggcgaaaagccgatagttatcgaagcaagaaacgatttatatgaaagtaacacttatagcggaaaatatggaagggtttttctccataacagagaatttttaggaaaagacattaaagtaggtaaatcatattcaaagtcgtattatcctaaaaagacaaagttgatccaaagtggaattggagttgattcgatattcaccatgtgcttccgctaaagtatgggggaaaaaataactttaataatttgtatcctctccctcgtgatatgcaccaaaatctattaaatccttggtgggataaatattaataagtaagaggtggctcaatggcagtttttgttgaaaaaacgctccaaggtctaaaagaattaattgatgaaaaaggccgcttaaaaattttagggaatgaaggaactcttttagagacagaatgtactttctctaaaggtgcaacagatctggagattgagagttttgagaagaaaataaaagtctcacttcctgaagattataaaacctttttaaaattgcataacggagccagaatatttgatttgttgatttacggtgagaatgcaggtgggggtttgcatattcttaatttagaagagattgaaaagtatatgcaaaatggttttttagagcctcagtttattcccgtctcacatctgttagacggatgttatttgttaattaacaaaaccaaaatgtccacagatccaaactatttatggttccgcagatttattgagtatgaaccaatgcaacttaattttgagatatttttagataggtatattttgtctcaaggatcaagtttttgggaatggaatatctatactgctgaaaattattataggactcaccagggtgatgaggattaacctttcctacagttgggttggttcatttttactattagacttcgatttgaacttttaaaaataggtttaatttaggagacgaaccgattaattggtgtatagaggatttataaaaagcgcagatactctgcgcttttttatttaagtattttccgaatcattcgcagcccgtttttggaagaaggataacggaaagcgaagtcgaagcggttcgtttgtttgacgacgctttttttgtgcgtaaacgtgttaaagctgtcaaatccgtgatagctcccgatgccgctttccccgacgccgccgaatggcaaatacggcgtcgcaacatgcattaacgtatcattgatgcagcctccgccaaacgacagattctctaaaacagcgcgctcagtttctttgtttgtggtgaagagatacagagcgagcggctttgggcgcgattggactttctcgatgacttcatcgatatcaccgtatgtaaacagcggaagaatcggcccgaaaatctcctcctgcatcactggagagtcatccttcacttgatctagaatcgtcggcgctattttgtggtgatcaggattaaattgtccgcctgtaagcgggacgccatcattcagaaagctgagcagccgctgatagtggcgttcactgacgattttgccgtactgcggattttgttcaggctgaggaccgtaaaattcgctgatcgcacgcttcatttcttctgtgagcttcattttgatatcttggtggacaaataaataatccggtgcgatgcaggtttgccctgcatttgtaaatttcccgaagataatgcgtttggcggcaagctgtatatcagcatccttatggacaatgcagggacttttgccgccgagctccaaggtaacgggaattaattgtttggcggcggcctccatgacgatttttcccacggcaacgcttccagtgaagaaaatatagtcaaagggctgctgtaataactcagtgctgacgtcgggcccgccttctgccatagcgacatagtcactcggaaaaacgctgctgatgagtttggaaagaacagcggaaaccgccggcgtatattctgacggtttgagaacgaccgtgtttcccgctgcaatggctccaatcaacggagaaagcgccagctgcaagggatagttccaaggcgcaatcaccaaaacggttccatatggctcagggataattatgcttttcgagcctaggtgagtcagaggcgttttgactcgtttcggtttgatccattttcccagccgcttcatcacaaaactgatttcctccagtacaattccgatttctgtcgtgtacgactcctgttcggatttgtggagatcctgatagagagcggctgttatatcggcttcttgtgttttgatggcttgtttcagcttttgcagcatgttcagtctcgattctagctgtctcgtatgccccgccgcaaaataggctttgtgcttgctgacgatagaggggatgctgttcattcagtcgctccttttttgtaaggtatgatgattcattatgtaaaaaatcgcttctgcttgtcaaatgggtttttctaatgtacatgtagctgaaaagccagttggcacataaaaaaagcccctgtccggggctttttttaataaagagagggagcatctgtccattattctgacagcccaaaagaaaaaccccggaaacattgtcatcacaacatgtccggggtttaatccaatgctctttaaagagcgttttacttaacgggagtagaactcaacgataagcgcttcgttaatttccggagcaagctcagagcgctctggaagacgagtgaatgtaccttcaagcttttcagcgtcgaaagtaaggtactcaggaacgaagttgtttacttctacagattctttgatgatagaaaggtttcttgatttttcgcgaacaccgattgtttgaccaggttttacttggtaagacggaatgtcaacgcggcttccgtcaacaaggatgtgaccgtggttaactaattggcgtgcttgacggcgagtgcgtgcaagaccgagcttgtacacaacgttatcaagacgtgcatctaaaagaatcatgaagttttcgccgtgtttaccagtcatttttgcagctttgtcaaacaatgtgcggaattgacgttcgtttacaccgtacatgtgacgaagtttttgcttttcttgcaattgcaaaccgtattctgatagttttttacgctgtcccggaccgtgggggcctggtgcgtaagggcgtttttctaattctttacctgtaccgctaagagagattcctaaacggcgagacagtttccaagatggacctgtatagcgagccataatgtgactcctcctttggttttattttgtggaaaataaaaaccgtctgttcgatccgaccgtgcacattttgttttcatgtatcctcgctccagcagcagagagttacacgatacaccttacagctaaggaacaaaatgcaaacacagaagctgaacaaaaaggctgcaatatttcacacaaagaacattatatgatttttccccgccgccgtcaaccatttctccatgaagagtgccggtttatgatataatgtacaaaaatgagtagtacatgtttaggtgataaaaatgaaaaaacaaacaattgatgaagtgacggcctttcatcagaaaatgctttcttttttcttaacgaaatctgaatccgtctcattatccgactcgctgttatggctggcctcagctctagaatcctgctttacatctctttcattgaccctttcaccggcagaatcaacacgtttcaccataaaaacagaagatgaaccgcattatgctccgctgaaagagagtgacggccgttttatgatcaggaatcagacctccggcagatccttttatctgtgctcggaaggcgggctgccgatcccggaatcattgcctgagatcgttactcagtttattaatcaatctgtgagacaaagcgggctgtttgacaaaacgaagcatcagcggaaaattcacagaatgacagaaatgttccattcgcttttggaccaaaatgaggttttggaaaaactgcaggcaagtttgagtacggctttccggtctttccgtttttcactgtttatcacgcaggatcaggatacggacagacagcttcccgcaaaagaattacatatggacggaaaagatgccgatccgtctgccctgaaggtttatttatcggggagactgctcagaaaaggcaggtcatctgcttatctgccgatcaaaggccagcaggggacttacggggttctgaagacggaggggctgcaggatgccgttctttcgtgcagtactctcagtgaaatgctgctgcttgcgggcgcagcgggaaaagcatttgaaaatgcgcagctctatgagcaatcgaaaaaaagcattgcgaatctggagctcattaatgaaacatcgcgccagctgaatcagcgcctcagactcactgatacgatgcgggagctcgccgccattatgacccaatcgtttcatgcggaagaagtggctttttttcatattgatcattttgagacgcaaaatctgcttccgggacataccgctttttttaagacagaacgtgcgaacccctatatcagcattgtgaaagaaaagctgttcgagggagaaaagggcgtgtttatcggcagcggaaagactgtattcggcgaaaacggtttcggctcgctgatggcggtgccgatgatcgaaaatgacaccgtcttcgggttcgcgattttattgaaaaaggatttgtatgcttttacgtttgaaatgtataagctttttcaagcgctcattcaccatgcgacattggcggtcacgaactccatgctgcgcgacaggcttgagcatcttgttcagacagaccagctgacggagctgtattcaagaacctatttggatgagaaaattcaatacagcatgaaaattcataaacggggtgtattcatcctcgttgatatcgataatttcaaaaatattaatgatacatacggtcatcaaacgggagattcgatcctgattcaggtggcctccgttatgaagaaccatattcgtgagcatgatgtcgctgcgaggtgggggggcgaggagctggctgtctatctgccgaatatcaacgtgtcatccggagaacgcatcgctaaaaggctggttcgcgccatccgggaaaataccgagccgcgcgtgacgatttcctgcggcgtttcctgctggtcaaagaccggcccgatgccgttgaaattgctcgttcagcaagcggatgaggcgctttatatcgccaaacggaacggcaaaaaccggctgatcatccatcaaaacagcacgacgacataaaaaaggagccggcctgccggccgggctcctttttttatcctaatcgtttttcaagcgtttcaacaaactttgctaaataggtttcgtccgtttcatcaaaacggtttttcacggggctgtcaatgtccagcacaccgatcacttcaccgtttacgcggatcgggagaacgatttctgactgggaagccgcgtcacaggcgatatgtcccgggaacgcattcacatcggcaatccgctgcacgtcgccattagagtaggcagtgccgcatacgcctctgccgaacggaatgcgcacacaggcaggaagtccttgaaacggtccgagcacgagctcgccctctttagcgaagtaaaaccccgcccagttgacttcatgtaatgaatggtataaaagcgctgacgcattcgcgtaatttgcgatcgcatccgtttcatcttctgtcatggcttcgagctgtttaagcagaagctgataacttttttctttatctccggattgtttttcgacatgaaacatggaaaaccctcactttttctataatatcaaacaaagttccggccgttctgccggcatttgtcgagaagttcttacaggaacggcgcctttctgcttgaattgttacacataaaggggtgagccgtatgaaagtaagcactaaagacaaaattattaacgccgctgtccagctgtttaaccaaaaaggttattccggcacgtccgtccgtgaaatcgcaaagtcagctgatgtaaatgttgcgcacatctcctactattttaaagggaaaggcggattaatggaacatttagtttccgagttttacgaaggctatactgaagcgctggaaaaagccgccgtcagtatgaagggtgaagacgcgcaggaacgcatcctgcgggtgattttcgatattttatcctatcagcacgataaccgtcaattaacgcggtttgtataccgggaagtgacgattgattccgtgcttatcagggaaattatgtctacttacttaatgaaagaaaaatatattttccagctggtgattgaagaagggcagtcacgccatagacggctgacgctgcccgtgccgcattttattctgcaattgaaatccctcttgatgatgccgtatctccagcctcaatatattacggaggtgctctatatgcagcctcatgagccgtacttttataaaaggtattttgaagaggtgaagatctggatcgaaagcgtgttccgacggcctgatgcggcgcttatgaagtaatgatgtttttgtacgtttcgtaggaactgccgacatcttccgcttgatgggcgtccgacccgaatatgagcgggatttttttttgcttcgccgtctcagccatccaatcctccatgtatacttccccggcaaacttctttctgagcccggatgtattcacatccagctccattccgtgttctttcacggcgtcaagacagcgggccgcaagctctcttatttgaggtgacatgctgtaagggaaaaggcgcgcgaattttttgacgagcgtgatatggccgacccgttttggcttaaaggggccgagcggtgttacaatggaagaatacacggtttcatagtattgttcatatacggcttcaacgcttccgaagcggtcggcaagctgctgaaaggcgtgctcgtcaaaatcgaggcatatataagacggaccggttttcaaaaaatgaacggataaaatgccgtcatccagtgaggggccgtacgtgttcagaaacgccgcggtttcctcttcataccctgtgataaaatcggtttctagcccagtcagaatgctgatttgtccatcgtattcctttttcagctgtgacagccgctccaaataaacctccatctgtctgagatccatcgcgctgtcctgaagcggtacgggatcttgaaatgacggaggaaggggggcgtgctctgtaaatgtgatcgagtcaaagcctctttccagggccttttcgacatattgtttcagcgcatccttcgagccgtgagggcaaaaaggggtgtggatatgagcgtctcgtttttccatttgtgtcactccattaaaaaattgcagaatcctgccgaaattatgcaaaaagtttttgatttctggtcaaaaaatgttggttacatggtatcataataacaatgaaaacgacagattttctcaatacatatattgaaatctttctgaatacataaaacaccctgacagattaagagaacaacaagggggctcattatggagttagtcatcggattattggttatactgctcgcgctctttgcggcgggctactttttcaggaaaaaaatttatacggaaattgaccggctggagtcatggaagattgaaattttaaaccgttcgatagtggaagaaatgtccaagatcaaacatctgaaaatgaccggagagacggaagagttctttgaaagatggcgcgaagagtgggatgaaattgtcacagcccatctgccgaaagtagaagagctcctttatgatgccgaagagaacgccgacaaatatcggtttaaaaaagcgaatcaggtgcttgtccacatcgacgacctcctcactgctgccgaatcaaatatagaaggcatactgcgtgagatcagcgaccttgtgacgagcgaggaaaaaagccgcggagagattgaacaggtgcgtgagcggtattcaaaagcgcggaaaaaccttctggcgtacagccatctctacggagagctttataacagcctggagacggatctcgacgaaatttggagcggcataaaagagttcgaagaagagacggaaagcggcaattacatcaaagcgagaaaagtgctgcttgaacaggaccgcagactggatcagcttcagacatacatagatgacgttccgaaactgcttgcggactgtaaacagaccgtgccgaaccaaattgccaagctgaaagacggctaccgggaaatgacggaaaaaggctacaaattggagcatattcaaatcgaaaaagagctggagaccctcacaaatcaattgaaacgggccgaaaacgcgcttttagaagaattggatgtcgacgaagcgtccgccatccttcagctgattgatgaaaccattcaatcgatgtatgaacagctggaaggcgaagtggaagccggacagtccgtattaagcaaaatgcctgagctgatcatcgcgtatgagaagcttgaggaagaaaaagaccgcacaaaaaccgaaacggagctcgtcaaggaaagctatcagctgacggcgggagaaatcggcagacagcatgccttcgaaaaacagctggaaacgatcggccggctccttgagcaggcgagagaaaagcttgacggcgagcatgtagcttactcgctgctgattgaagaagtcgaggccatcgaaaagcagatggaagaggctcagaaagaacatgccgaataccgtgaaaatctgcaggcgctcagaaaagaagaactgcaggcgcgggaaacgctgatgcatcttcggaaaaccatttctgacacggcccgaatgctgcaaaaaagcaacgtgccgggaattcctgaacaagtcaaggacaagctcgagacggcaaatcatcatatagaagaaaccgtcagccaattggaagagctgccgctgaacatggaggaagccgccaaacatctggctgaagccgaaaaggtggttgaggaagtcagtgaagaggcggaagatcttgtgattcaggtgaagctgattgagcggatcatccagtacggcaaccgcttccgaagccagaatcatattttatccgaacagctgaaagaagcggaacggctgttttatgcttaccgctataatgaagcttatgagatggcggcagatgctgttgaaaaagcagctcccggcgccgtgaaaaaaattaaagctgatcaatctgcttcatagacgcataagcaaaaactgcaccctgatggaaatcagaggtgcagttttttagtttctcacggaatataaaaagcgcctgcggctgatatacatcaaaccgcaggcgctgaatgttacgattttgctttatttaattcgatgggcgggctggtaaaaaacgtgataatgcagccgatgatcgctccggcaatgcccggaagcacccagccgattcccatgctgtaaagcggaagatttgcgtttaagaatgaatctaatgatccgagcggaatgccggctgccttcaaaccgtccaggatactgaacagccccgttccgatcaggcaggcgatatagacttcgcgtctttccttaaagattttatcaataaaggaaaggacgataatgacaatcgccagcgggtaaatggctgataaaataggaactgaaaatgcaataatctcagcaagtccgaaatttgaaatcgccagactgaacagcgtgacaatcgtaaccaccattttgtatgataaagctggaatcaattttgaaaaatattcgccgcaagatgtgacaagcccgatgcttgtcgttaaacacgcaacggtgatggcggcgccgagaacgatgtttcccagtgaaccgaacaggtaatcagatgaagctgataaaatctttgcgccttcgccgagcggccccacagcgtccgtgcttgtcgctcccaaataggccaaagataaataaatgaatgtcaaacctgccgctgcaatcagacccgctttaatacaagcggcggcgagcgctttacgctgggtgacgcccctgcttttaacagcgttgacgacaacgacgccgaagacgattgaggcgagcgcatccattgttttatagccttccaaaaatcctttgaacaccggcgttccggaatatgcctgatgtacggcgcccagcccgcccatcggagtgacaatggcttttacgacgatgattaaaataataccgaatttaataggagtcaaaatctttccgactctgtccacgattttggaagggttaagagctaaataatacgtaatagaaaaaaagatcaacgtgaaaacaaataaagataatctttccggaatgccgcttaaaaacggaactgcaccgatttcatatgaaacggttccggttctcggaatcgcgaaaagcggcccgattgataaataaagcacaacggtgaaaatagtcccgaataccggatgagctttatcggcaagccctttcgcgtctttgcccgttaatgcgatggcgataatacccaaaagcggcagaccaacgccggtcagtaagaaaccgcccatcgctttccagacattatgccccgccgcttgcccgagctccggcggatatatcatatttcctgccccgaaaaaaagtgcgaaaagcatgaaaccgataataacggtatctttgacaggtagtgagtgtttcataaaaatcctcctaaatactatgttgaaatattctgtcaattaattgtcagataatataacaaaacgaacattacttattatatggcaatgtacagagaagtcaatactcgatttattgcgaatttatatttacttttgttatggtagcataaatatcatacgatgtaccgttttcattaaaggagtaaaaaaaatgatatatttagacaacagctcaacgaccgagccgtatgaagaggtattggatgtgtacaaacagacgagcagccgttatttcggcaatccttcgtctctgcaccggttaggaactgagacggaacagctccttgaagcggccgctcagcaaataaaaaaaaccttgcgtttaaaaaattatgatattgtatttacatcgggcgcgactgaagcgaataacgctgcgttaaagggagcagcctgggcaaacatgagtaaaggaagacatatcattgcttcggcgattgagcatccttctgtgacggagacgcttgatcagctgacagagctgttcggctttgaagtcacatatcttccggccgatcaaaacggcttcgtttctttgaaagacgtcaaatcggctatcaggccggatacgataatcgtcagcgtcatgcatgtcaataacgaagtcggctccattcagcccgtaaaggaaatcggcgggtttttaaagcagcaccggaatattctgtttcatgttgatcatgtgcagggcattcataaagttcccctgtctatagaagaagcgggcattgacctttgcaccgtttcagggcataagtttcacggcttaaaagggaccggagcgcttatcgtcaaaaaaggaacgcggctcattccgcttataacaggcggctcgcagcaaaaaggcgtccgcgccggaacggaacacacggcaggcgccgtttcccttgcgaaagcgatcaatctttccgcgcgtgacatgaacgagcggctttcttccgtggaggctgccaagaatgcgctcatggaaaggctgagcgggacggacggggtcgtcatcaacacccccgctgaaagcagcgcgccgcatatcattaatttttccgttccgggcgtgaaggcggaagtgctgctgcacatgcttgaggaaaaaggaatatatgtctccacaaccgcggcatgttcggcaagagagcacaaaccgagccgtgttcttctgcaaatgaataaaggcgaacagattgcatcaagcagcataagagtcagcctgaacttcagccatacggctgacatcacggagccgtttatggccgcgctggcgccggctgttcaaaaactaaaaaaaatgatgaggtagcatatgaattacgatcatattttaatccgctttggtgaaatatccacaaaaggaaaaaacagacgcagttttattgaaagattaaaacagaatatccgcctggtattaaaggattataaaaaagtaaaatacttttcaaaccgggaccggatgtcaattacacttaatggagaaaacctggaggaaatttgttccttattaaagaatatattcggcattcaaagctttagtctcgcaattaaatgcgaaagcaagctggaagacattaaaaaaacggctttagccgcgatagaaggcgaatataaaccggggaatacgtttaaggtcgagaccaaacgggcttacaaacagtttgaattagatacgaatgcgatgaacgctgaaatcggcggccatattttgaaaaacacggatggattaaccgtcgatgtgagaaatcccgatattccgcttcggattgaaatcagggaggaagcgacattcctgaccattcgtaacgaaaaaggcgccggaggccttcctgtcggttccgcgggtaaagcgatgctgatgctttccggcggttttgacagtccggtcgccggtttttacgcgatgaaacggggattatcagttgaagccgtacatttcttcagtccgccgtatacgagtgaacgggcaaagcagaaagtcatggatctcgcgggatgcctcgcgaagttcggcggcagtatgacacttcatatcgtgccgtttacaaagacgcaggaactcatccaaaaacaaatcccggagaactatacgatgacggcgacgcggcgtcttatgctgcaaatcgcggacagaatcagagaagaacggaaagcgctcgcgatcattacgggagaaagcctcgggcaggtagcgagccagacgcttgaaagcatgtatgcgatcaatgcggtgacggcaacgccgattttgcgccctttaatcggaatggacaaaacagaaatcatcgaaaaatcaaaagaaatcggcacttatgaaacgagcattcagccgtttgaggactgctgcaccatctttacgccgccaagtccgaaaacacgcccgaaaaaagaaaaaatcgagcacttcgaaagcttcgttgattttgaaccgctgattgcagaggccgctgccggcatcgaaaccatcactgtttactcagagcaggaagctcacgataagtttgccggcctgttttaaaactgtatacaattaccactgtttactcagagcaggaagctcacgataagtttgccggcctgttttaaaactgtatacaattaccaaagtttttttgaatgaagacatgtgttttatcacattctatactcacaaggaggtgatacacatgtcacaacaatcaaacagcggaaacagcaaccagcttttagtgccaggcgctgctcaagctatcgaccaaatgaagtatgaaatcgcttctgaattcggtgtaaaccttggaccggaaacaacttctcgcgccaacggttctgtcggtggagaaatcacaaaacgtcttgtctcttttgctcagcaaagcatgggcggaagcagccagcagcagttttaatcacaacttcacataatggctaagagagcggggaattccccgctcttttttcatgagtatagatagaaggcgggaagcaatttatgcatatttttattgtaatggcctatgtttatgtataatggggaaagaaagtgaggagttgttcgtgttaaaacgagaagatttaatcgccccaaagaactataaccttgtaaatgaaatcgaaaagttcagccgttccaaagagaagaacgcgcttatttgggaagatcaaacaggcggcaagaaagtctggacgtatgaaaaattgatggaagaaacgaataaaatcggagcccgcctgaaaggtctcggatttgaaaaaggcgataagctgattgtcatggttccgagagtgcttgaagcgtatgccgtttatttagcgatcttaaaagcggggatggtcgtcattccttgctcggaaatgctgcgcgccaaagaccttgaataccggatcaaacacgccgaagtgaaaggcgctatcgtttatccttcatttataaacgcgtttgacgaggtgaataccgaacagctggtgacattgtcaatcggtgaaaatgatgccggctggaaaaacctcctaacgattgaagcggatggagacagttttcaaacagctgatacaacaagagaagacatggcgtttttgtcctatacttcaggcacgaccggccagcctaaaggcgttgtacatacacacggctgggcctttgcccatttaaaaacatcagccggtgcatggctggatatttctgaagacgatacagtgtgggccaccgcggcgcccggctggcagaaatgggtgtggagcccgctgctcgcaattctgggaagcggcgcgacaggagtcatttatcacggcagattcagcgccaagacgtatttagagctgctggagcgccatcaagtaaatgtcttctgctgtaccccgacggaataccgcctgatggcaaaagtggaggagttggacaaatatgatctttctgcccttcacagcgcagtttctgcgggtgagccattaaaccgggaagtcattgacgtattccggaagcatttcggcattaaagtgagagacggatacggccaaacggagagcaccctgttagtcggcgtcctgaaggatatggatattaagccgggaagcatgggcaaaccgacccctggaaatcaagtggagattataaacgataaaggcgaaatatgcgaaacaggcgaaacgggcgatatcgccgtgcatctgagcacaccggccttattcaaggaatattataaagatcccgaaagaacgaaaaagcagattcgcggagattactttcttacaggagaccgcgcgaaaaaagacgaggacggctacttttggtttgagagccgcaatgatgacatcatcgtcagctccggatatacaatcgggccttttgaagtagaggacgcgctcgtgaagcatccggaagtgaaagaatgtgccgtcgtggcgagcccggatgaaatcagaggttcaatcgtaaaagcctatgtcgttttacaagacgatgaaaagcgcagtgatgaacttgtcaaagaactgcaaaaccacgtaaaaacgattacggcgccttacaaatatccgagagaaattgagtttgtcgaaagcctgccgaaaacggcgtccgcaaaaatcagacgtgtggagctgagacagcgtgaagaacggctgaaggctgataaaaaagcataatacaggataaagggtgagcggggatgaaagcgatttggcacggcggcaccatctatacaatgctggacaagaatcatgtcactgaagccatttataccgaagaaggcgtcgtcaggcagacgggcagcttccgggagctccaaggaacatacggttcgcctgatacggaggaaatcgatttacatggggctgtcatgttcccggggtttacggacagtcatatgcatttaatcggacacggggaaaaacagcttcgcctcgatttgtcgcagctgacgtcaaaagaagcgatactgcgggccgcaaaagaagcagagcgtgaattggaagatggcgaatggctgatcggcgaaggctgggatgaaaatctgtttgaacagccggattacgtcacgaagcatgaccttgacccgctctttcccgaccgccccgtcctgctgaagcgggtatgccggcacgccgcggcggttaattcggccgcattgcgcgcggcgggaattacaaacgaaacacctgatccaaacggcgggattatcgtccgggatggaaccggtccgacgggccttctgctggataaagcccaagagcttgtgacacaggctctgccgcccgtctcacttcactatgtcaaacgcgcgcttcaaacggcgattacggactgctggtcaaaaggcctgaccggcgggcattcagaagatctggcatactacggagacgcgtccgttcccgttgccgcgtacgagtcattaaccggcagcggcctttatccttttcgcgcccatctgctcgtacatcacgaagccgtcgacagctggagcgctctggataaatcgaccggaccttatttggaatacggagcgatgaaaatttttgctgacggtgcgctcggaggcagaaccgctctattgaaaaagccttaccatgatgatccgtctgtttccggcgttcaggtgcatgatgacgaaacccttgccgctcttgtttataaagcgagagagaaagggatggagatcgccgtgcacgcgattggcgaccttgcatttgaaaaggtgctggatgttatcgaaagatacccggcaaagcccggacagctagacaggctcattcatgcgcaagtattagatgacggattgattgaaagagccgcccggctgccgatcggacttgatcttcagccgcattttgtggccagtgattttccgtgggtgattgacaggctcggagaagagcggatgaaaacggctttcgcctggaaaacactgctgtcaaaagggctgctgtgcgccggaggttcagatgccccgattgagccggccgatccgcttctgggtattcaatcggctgtgctccgtacgagcaagcagcacccggaaggtccggcctattatgaaaaagagtgtctgaccgtgtacgaagccattcagctttacacggagggaagcgcggccatcatccataaagaacatagccgcggacggatcgcccccggctatgatgccgactttaccgtactcagcggtgatccgttcaggacggacccgaaaaagcttcatgaattggaagctgtcaaaaccgtcgtcggcggccgtatcgtatatgaaaaagaggacaggcagtgatgcccgtcctctttttttatgataaaaatgatcgttttactttttcccagaaagagttgtctttcagtttcaccgttttgatttttttatcggatagtctaatctcaacctttttgacattccgcgtgctgagcgcttcattatcaagcccgataatcggatgctcattgccgccttgcaccacctgcagtgtcagcttccggtctgagcttaaaataaacggagatccgagtgtacggtatgtgttgttgttcaacgacgccagttcggatacctgcatgcaggaaatcaaaggatcaacaacggcgcctgaaacagatttattgtaggcagtgctgcccgtcggggtggaaatgatcatcccgtctcctctgaacgtctcaaaatgaagatcatcaattaacacatccatcacaaacgttttaataatgcttgaacggatggaaacctcgtttaaacagtgaaaatgattgctgccgtccaccgttacgtgaatgagcgggtattttctgacctcaagctgttccgcggtcatgctggccgccattttttcaggatcatcgctgtgaaaatcacagtacaaatgggctttcccttttttagcgatgccgacatacaggcagtcatcacggaatccggtttttctgacggcttgcagaaatgagccgtcgctgccgatgctggcgataattccggcatcctccggttgagccgcaactgtaaaaccgtgcgattcagcaagctgcttcaaagagctgacttgttcttttgtttcgttgttttgtttgtgaaaaaaataaacattgcggcgaagatcggtcatatccccattcccctttgctgtcatatttacgtttttctcccagcaggtattgtgttaaaatacctgtggcaatagtgtaacatgtttcctgtttatccgttaagggaaagcgcttcatgaaaaaaatgaatctttttttacgggggaacgtacgaatattgacagaaaaggaggagaacaaatgaatgcaaaaagatggattgcgctcgtcatcgcgctcggcattttcggcgtatcagtcattgcaagtgtgaccgtcggggtgctgaagaatatcggagatacagggtctgactttgcatcactgacagatgacacagaggaagtgacgctggataagggcagccccggcagtaaaatcgccgtgcttgaagtggacggcacgattgaggataacggcgggtccgctggcctgctcagctcaggcgggtatgatcacagatcatttttaaaacaggttgagcgtgcgaaagaagataaaagcgtcaaaggaattgtgctgaaaatcaattcacctggcggaggcgtatacgaaagcgcggaaatacataaaaaactggaagaactaaagaaagaaacgaagaaaccgatttatgtatccatgggttccatggcggcatcgggaggctattatatttcaacggccgccgataaaatctatgcttcaccggaaacgctcacgggttcactgggcgtcatcatggaaagcgtcaattattccaagctcgccgatgaactcggcatcaagtttgaaaccattaaaagcggcgcgcataaagacatcatgtccccgacccgcgacatgacgaaggaagaaagaaagatcatgcagacaatggtcaacgattcttatgaaggatttgtcaatgtcatttcaaaaggccggcacatgtcaaaagcggatgtgaaaaaaattgccgacggccgtgtttacgacggcagacaagcgaaaaaaatcggcctcgttgatgagctcggtttttacgatgacacgatcagcgcgatgaaaaaggaccataaaaatatgaaaaacgcttcagtcatcacatacgaggaaggattcggattaggctcgctcttttccatgagcgcagcgaaaatgtttaaaagcgaaattgattttctgaatatgaaagaactcatttcgcaatccggttcgccgcggatgatgtatctctatgcaaagtaggggggaagaaagaatggacgcgacttacgaaggctttcacggcaaagaagaggaagccgaacaacagagggcgcccgagcaggcatatgcgggcttttggatcaggttttgggcgtttcttcttgattggctggtggtctggggacttaaccatctcatcgtttcaccgattttcacgctgatgaagctcccggcaacaagcggaatgtttacaatctcagcttattccgtcacaaccctgatcgtctacctcgcctattttgtgttcatgacgaaatggtttcatcagacactcggcaagatggtcttcgggttaaaggtcacttctttgacgcccggaaagccgctgacttggagcaccgtcattttcagagaagcggtggggcgttatatcgataaaatctggattctctatatcgtcattgcgtttacgcccaaaaagcagggcattcatgatctgatcgccgacacaacggtgattcacgaagcgctgtaccgcaaataaaagcagtaaacccggaataaacgtccgggtttattttttttggttttggcgataatgctgctaaggaagtgaagcttatgggatatgccgcagcagctgttattctcattctcattttggcctggctgctcatgaggatgaaaatccacctgactttcgaatatcttcacgataaagataacgacaaactgacgtttaaaatctcggccttatacgggctgatccgtattaaaaaaacgctgcccgtcattaaagtaaacagcgaagacgcgtcaattgatgtcaaacaggacacaaaatcagaaatgaaaggtcagaaaaaagagaagaaaaaaatcacatatgaagatgtcaaacagagcattcacagaatagaaatgattctgcaccaagtctttcagatgcgccaaatcgccgcttcatttcttgcgggagtccgtgttacgaagttcgaatgggtgacggttatcggaataaaggacgccgccgttactggaatcgccgccggcggattgtgggccgtaaagggaggacttacggcgatgctgtatgatcatctgcgtttcatacataaaccggtgtgcgaagtcattccgtcttttcaagtgcctgcatccaagacgcatttgcagtgtatattcttttttcgttttggacatcttataggtgcagctttcaaattgcttaaatacgggcggaacggactttctatcatacgaaagaaacagccggttccggttgcttcaaagaatgattcatcagtttaaggaggagcgcatatggcagaccatcccattcaaggtttaatgaaaaccgctatggaaaatttaaaagaaatgattgacgtgaatacaatcatcggcgatcctgttgaaacgcctgacggcagcgtaatcttaacggtttcaaaggtcggcttcggatttgcggcgggcggaagcgagtttggaggaaagccggctgaaaaaagaaccgatgatgatgaaagaaaagagcagaagctcccgttcggcggcggaagcggcggcggagtatccattacgccgattgcgtttctgattgtcggaacaaacggcgtgcgcatgcttcatttagacgaaaacacccatctgattgataaactgttagactccgcgcctcaaacgattgaacgcatccagcatatgtttaaaaagaatgaaaaaggccggaaccaaaaaagaacggatatcgatttataacagaaaagttaactgccgcccgcagttagctttttttacgatgcggcataacctttgcagtttgcataaaactcgactatgatagagctatacatagataaagggaggaatcagaatggctgaaattacatttaaaggcggagccgtgacgctgatcggacaagaagtgaaaccgggggaccaagctcctgacttcacggttctgacaaacggattagaagagaagacattagcagatatgaaagggaaagtaacgatcatatccgttattccttccattgacacaggcgtatgtgacgcgcagacacgccgcttcaacgaagaagccgcaaaactcggtgatgtgaacgtttatacaatcagcgccgaccttccgtttgcacaagcgcgctggtgcggagcgaacggaattgataaagttgaaacattatcggatcataaagagatgtcatttggtgaagcattcggtgtttatatcaaagaacttcgtcttttggcacgttccgtattcgtccttgatcaggacggaaaagtcgtttacgcggaatacgtaagtgaagcgacaaaccacccgaattatgaaaagcctatcgaagctgcaaaagcgttaatcaagtaaagagagaaaaagagctccgggtgctgccgcggagctcttttcatggcaaggaggaaacagcatgcaacacgaccatgtcggtcagatttatgaacttttagatgaagccgcccaagtgatagcagaaggccttcagatttcttatattgaggggcttgcggaagcgggagaaatgtattttcttgaaaaggccgaccagcttccgcttcaggaaaagcaaaccggcgagcttaacagcctgcttgcgaaagcagacttcagaaaatgggagcatgaatggatccgcaaggcgttccagctcgccattttaaaagggctgaaagataagtcccatccgaacagacagatgacgcctgatacgatcggcattttcatcagttacctcgtgaataaatttacgggcggccgaaaaggcctgacattgctggaccccgcctgcggcaccggaaatcttctgctgaccgcggcaaaccagctttcggacaaagcggcaaaaagcttcggcattgaaatcgacgatgtccttctgaagatcgcttatgctcaggcgaatctgcaggaaaaagaaatggagctgttctgccaggacagtcttcagccgttatttatcgaaccggccgatgcggtcatctgcgatttgccggtcggctactatccgaatgacgaaggcgctgaagcgtttgagctgaaagcggatgaaggtcactcttttgctcaccacttatttattgagcagagcgtcaaacatacaaaaccgggcggatacttattttttatgattccgaaccatctgtttgacagcgcgcaaagcgataaactgaagcggttttttgcggaaaaagtgtatatcaacgcccttcttcagctgccggctactatgtttaaagacgaagcgcaggcaaagagcattttaatcttgcagaaaaaaggcgaagacgcaaagccgccgaaacaagcgcttttggcgaatcttccttcttttgcgaaccagcaggcgatgcgggagatgacggcaaaattggatcaatggattcaaaaagaaaaataatggcgaaaaagcagtgtgagatgcaaaatcccgcgctgcttttgctttttaaaatgaatggaaatcaggaagataacacaaattaaggaaagaaaataacattccgtaaggccgtgccgtccatttggcacaaatgaaatttatcagaaaatatcgacttcatattgtaagcggtaccaatgtggatgttgacttgaaatgctgagttgacaatgtttaaatggaaaagtcagatattttttggactgcagttatggtctgggaaaaaagaacgaacaaacgaagaagaattttgataggagcgtcatttatgtctaaaattattgcaattaacgcaggaagctcatctttaaaatttcagttattcgaaatgccttcagaaaaggtgctaacaaaaggtttagtagaacggatcggtatcgccgacagcgttttcacaatctctgttaacggcgaaaaaaatacagaagtgacagatattccggatcatgcggttgcggtgaagatgctgcttcacaagctgactgaattcggtattataaaggatttaaatgaaattgacggaatcggccaccgtgtggttcacggcggagaaaaattcagcgattctgttttgcttacggatgaaacaatccgtgagattgaagagatttcagaactagcgccgcttcacaacccggctaacatcgtcggcattaaagcctttaaagaagtgcttccgaatgtgcctgcggttgcagtgtttgatacggcgttccaccaaacgatgcctgaacaatcttacctgtacagcctaccgtacgaatactacgagaaatacggcattcgcaaatacggtttccacggcacatctcataaatacgtgacacagcgcgcagctgagcttctcggccgcccgcttgaagatttgcgtctgatttcctgccacctcggtaacggcgcaagtatcgcggcggtagaaggcggaaaatccattgatacgtcaatgggcttcacaccgcttgcgggtgttgcgatgggaacacgttcaggaaacatcgaccctgcattgattccgtacattatggaaaaaacggatcagacggcagatgaagtattaaatacgttaaataaaaagagcggactgcttggcgtatccggtttctccagcgaccttcgcgatatcgtggaagcttcaaaagaaggaaacgaaagagcggaaacggctcttgaagtgtttgcaagcagaatccataaatacatcggttcttacgctgcgagaatgagcggcgttgacgcgattattttcactgcgggtatcggtgaaaacagcgttgaagtcagagaacgcgtgcttcgcggcttagaattcatgggtgtatattgggatcctgcgctgaacaacgtgcgcggcgaggaagcgtttatcagctaccctcactctcctgtcaaagtcatgatcattccgactgacgaagaggtcatgatcgcacgcgacgttgtccgccttgcacagtaatgatcaaaaaaagcacatccttttagggtgtgcttttttattgaatgccccaggatcaaacgttacgatatgtttaatacataaacgatgaggtgaagcaatgagtgtgcatgaacataaacaagaagccccgtcagccgtgcgctgcaaggtgatcacagtcagcgacacgagaacgaaagaaaccgacaaaagcgggcgcgtcatgatggacttcctcagggaagcgggatttgaaacggtcgcttatgacattgttaaagatgaaaaagatgaattgcagaaagccgttttatccggctgtatggatgaatatacagatgcggtgctgttaaacggagggacgggcattgccgaaagggatgtcacaattgaagcggtcacgccgctgttttcaaaagaacttccgggattcggcgagctgttccgcatgctgagctatacggaggacatcggttccgccgccattttgtccagagcggcagcgggtgtgatccaaaataccgcagtcttctgcacgcccggctcctcaggcgccgtaaagcttgcaatgagtaaactgattattcctgaactgccccatgtgcttcgggaaatccgaaaagatttataaatgtataaaaaggctctgctccgctcaaaaaattgggtggggttttttttataaaaggcttgaaaaaacagaatttacttgttacagtgtatacatacaaaatgcatttttattaattaaaactaatttttatacaaaagggagcttttaacatggcagaacaaaaaaaggttgtattggcatactcaggaggtcttgatacttctgtagcgataaaatggctgcaagaacagggatacgatgttgttgcctgctgcttagacgtaggggaaggaaaggatttggcattcgttcagcaaaaagcgctggaagtaggcgccgtaaattcctatgtgattgatgcgaaagaagaattcgcccgggagtacgcgctcatttctatgcaggcccatacaatgtatgaaggcaagtatccgctcgtatctgcactatcccgtccgttaatcgcgaaaaaactcgttgaagtcgcggaaaaggaaaacgcggtggccgtagcgcacggctgcacgggaaaaggcaacgatcaggtgcgtttcgaagtatccattaaatcattaaatcctgatctggaggtcattgctccggtccgtgagtggcaatggtcgcgtgaagaagaaattgaatatgctgcaagccgtggcataccgattccgatcaatcttgacagcccgtattccatcgaccagaacctatggggacgcgccaatgaatgcggtatattagaagatccgtgggcggcgccgcctgaaggggcatatgacctgacagcatctcttgaaaacacgccggacgttccggaaatcatcgaaatcgcatttgaagccggtgttccgatttcaatcgacggcgtaacctatccgctcgctgatttaattctcaagctgaacgagactgccggaaaacacggcatcggccggattgaccatgtggaaaaccgcctggtcggcattaagtcccgtgaagtttatgagtgcccgggcgccatgactttgattacggctcacaaagagcttgaggatctgactttagtgaaagaagtggcccatttcaaaccggcaattgaacaaaaactgtctgaaatcatctataacggtttatggttctcgccgttaaaagacgcgctgcttgcattcctgaaagaaactcaaaaacacgtcaccggcgtcgtacgcgtcaagctgtttaaaggccatgccattgtagaaggacgtaagtcggaatattcactctatgatgaaaaacttgcgacatatacaaaagacgatgcttttgaccatcacgcggcaatcggtttcattgagctttgggggctgccgacaaaagtaaacagcattgtgaaaaagaaggagcagattgaagcatgaagaagctttggggaggccgttttcaaaaaacaccggaaaagtgggtcgatgagttcggcgcatccatcacgttcgaccaaaacttagtcaaagaggatattacagggtctctcgctcatgcggcaatgctgaaaaaatgcggcattctgacggaagaagaagaaggcgccatccgacaggggctgcagaccctcctgcaaaaagcagaggaaggaacgcttgaattctctgttgattatgaagatatccatttgaatattgaaaaaatgctgatcgaagaaatcggaccgctaggcggcaagctccataccggcagaagccggaatgaccaggtggcgaccgacatgcatttgtatttgaaagatcatgtctcacatatcatcgtgctgattgaacagttccaaaaagcgctgatcgaaaaagcggaggcgaatgtcgagaccattctgccggggtacacccatttgcagcgggctcagccgatttctttcgcccaccatctgcttgcttatttttggatgcttgaacgggataaagagcgttttcgcgacgctatgaagcggattaacatatcgccgctcggatgcggggcgcttgccggaaccacgtttccgatagaccgtaactattcggcggagctgctcggttttgactccatttatgagaacagtcttgacggagtcagtgacagagattttattctcgagtttttaagcggcagcagcatgctgatgatgcacctttcgcgtttatcagaagaaatcattctatggtgctcgcaggaattcaggttcattgaactggatgatacgtatgcgacgggaagcagcatgatgccgcagaagaaaaaccccgacatggctgagctgatccgcggtaaaaccggacgcgtatacggtgatatgatggggcttttcacgattatgaaagggctcccgctcgcttacaacaaagacctgcaggaagataaagaaggcatgtttgacacggtgaaaaccgttgaaggaagccttcagattttcacgggcatgattgaaacgatgaaagtaaacaaagacatcatgaaacaagcgacaaaacaagatttttcaaacgcgacggaacttgccgattatttagctaaaaaaggcatgccgttcagagaagcgcatgaagtggtcggcatgcttgtgtacagctgcattgaaaaaggaatctatttaagtgatatggcatttgaagaattccttcaagccagcagtctctttgaagaagatatctataccgtgctcgatccgcatcatgcagttgaaaaaagaatgagcgccggcggaacgggttttcagcaggtagaacaggcgctcgtaaaagcaaaagcctgcgccggcatttaatttgctgaaatttccttcatattttcccgtcatatcagacaccctacatctataaagatgggaggtagaaggaatgcgcaaagaacaagaccgttacatctatgatgaaaaagaaagtgaagaaacggccaggctcatctcagaggcatacgaaagcggttatgtcggcatggaggaagcctctgctccttcagaaaattaagctgtctgtaaagacggcttttttttcgtgcggacgaagtgcaaaaaagtgatattgccgtttgtttatagtaaagtagagggagaaacgtcttgattttattgaagcggcaacgttgcctggggagggtattcaatgtgcgacatgctctaatcactgccggtacaaagggattgggccgaaaagtaactgaaatgcttctggaaaaaggcttttctgtcacagtgaattacagacaagacgaagaagcggtcgcctgtctgaaggcggattatcccgggtgccatgacagattgcaattcgttaagggcgatgtaacccggaaagaagatcttatgcggatcgccgatgcagcccttcagcggtttggaaggattgacatactgattaacaatgccgggccgtacatatttgagcgcaaaaagcttgccgattactccgatgacgaatggtatgacatgcttgaagggaatttaagcgccgttttccatctgtttaaagcggttatcccggtcatgagacagcagcggttcggccggattattacatacggttttcaaggagcggaccatgcccccggctggcttcaccgttccgctttcggagcggctaaagtcggattggcttcgttaacgaaaaccattgcgattgaagaagctgaatcaggcattacggccaatatggtctgcccgggtgatattgtaggagatatgaaagaagcgtctatagaggaagcaagacggaaaatcggcaaagaaaagacgccgatcggcaggtccggaaccggagaggacattgcgagaatcatcgcctttttatgtgaagatgattccgatcttgtaaccggaacggtcattgaagcaacaggcgggctgaatgtgattaacaggcatcaatccctgtaagttttttcgtttgtcaaaaagggaacttgataaatattaattttttatgaggtgaaaacgatgaaagtgacttatcacggacattctgtcattcaagtggaaacgaaaacccataacattatttttgatccgtttctgaccggaaacagtctgacaaatttgaaaccggaagaagtgaaagcggatgtcatcctgcttactcacggacacaatgaccatgtcggagatacagagcagatcgctaaacaaaacgatgcgctcgttattgcgccgaatgagctggccgtttatctcggctttaaaggtttaaaggtccacccgatgcatatcggaggggcgcgccaatttgatttcggcaaagtgaaactgacacaggcattccacggatcggcggtcactgatgaagaaaacaaaaccattacgtacacggggatgccggctgggattttattgacgattgacggcaaaacgattttccacgccggggacacggcgctgttctctgatatgaaactgatcggggaactgaatcacattgacctggcgtttctaccgatcggtgataacttcaccatgggccctgaagatgcgaaactcgcggctgaatggctgagagcgaaacaggtcgttcccgttcattacaatacatttcctgtcattgaacaggaccctgacgctttcgccgaaagtctgcccggaggcgtcggcaaagtcatggcggtcggcgagaccattgagcttgcctgacatatgtgtcaaagaccttctgaatcaagcattcagaaggtctttttgtgatgccgccttttttcgggcgtctcattgcgaatgaatcccccgtacccttataataaaagcagaagactgtccttagaggtgaaacgcttggcaacaaagcatgaacaaatcctatcatacatagattcgcttcctgtcggtgaaaaaatttcggtcagaagaattgcgaaagaaatgaaagtcagtgaaggaacggcttacagagccattaaggaagccgagaacaaaggattcgtttccactattgaacgtgtggggaccatccggattgaacagaagaaaaaagaaaatattgaaaagctgacatacgccgaggtcgtcaatgtgatagacggccaggtgctcggcggaaaagccggtctgcataaaacgttgaataagtttgtgatcggcgcgatggagcttgacgcgatgatgcgttatacggcggcggggaacctgttaatcgtcgggaaccgaatcaacgcccaccgccaggcgcttgaagcgggcgcggctgttttggtaacgggagggtttaataccgacgacagcattatcgagctggccgatatgcttgagcttccgattctctccacgagttacgatacctttacggtagccgcgatgatcaaccgggcgatctatgatcagctcataaaaaaagagattgtgctcgtggaagacattttgacgcccgcagatcggacagtgacgctgtcccctaaggataagctggagaaatggtacgaaaagaactatgaaaccggacacggccgcttcccggttatcgaccagcagatgaaaatccacggaatcctcacatcgaaagatatcgcggggcatgaccggtcagttccgattgaaaaagtaatgaccaaaaaccctgtcacggtgatcgggaaaacatctgtcgcctcagctgctcaaatgatggtttgggaaggaattgaagtgcttccggtgacagacgggcatcacaaactgatcggaatgatcagccgccaggatgtcttaaaagcgcttcaaatggttcaaaagcagcctcaggtcggggaaaagctggatgatattgtttcaaggggatttaaagaagacgaagatgacaaaacgccggccgtttatcaatatgaagtcacgccgcaaatgaccaatcagctcggcacgatttcttacggggtgtttacgacgattttaacccaggccgccagccgatttttacgctcccgcaaacgcggcgagctggtcattgaaagcattacgattttcttcctgaagcccgtacagatggagtcggtcattgaagtgaaaccgcgcattttagaggcgggccggaaattcgggaaaatggaagtggaagtgtcaagccaaagcggcatcgtttcaaaagcgatgctcatggtgcagctgatggagagaagttaagggacgcacccgggtcccttggcattcattatgcgtggtccctctccgcttcctttgcatggatgggctcataatgcttataggctttatacccggcccatgcgctgcctgctccgattaaaatgaagacgccgccgatgaccagggtcaggacggagtgaaacagaatcatttggtttactccgtacaaaagcaccagcgcgcctaatgccatacttgatttagccgaaaaacattccttctccagcgcccgtttcgtctggattccttttactttgtaatacacgtaaaagcaggcagaaagcccgatgagaaaaacaaaaaccagcataaatgaaatcctccattatatgagtttgcaaaaccgtttataccgttgctgaaagattttccttttccatggataaagagtatgattaaatgaataaaaacgaaaaggagaaagcgatgaaatccgaactgatcagaaccatatcattatatgacaccattatcttacatagacatgtgaggcctgacccggacgcctacggttcacagtgcggccttacggaaatcctgcgggaaacgtatcccgaaaaaaatatttttgccgtcggacagcctgagccgtccttgtcttttttatattccctcgatgaggtggatgacgaaacctataaagatgctcttgtcatcgtgtgcgacaccgcaaaccaaggcagggtcgacgatcagcgctaccattccggcgcaaagctcatgaaaatagaccaccatccaaatgaagatccgtatggcgatctgttatgggtcgatacgaatgcaagctccgtaagcgaaatgatctatgagctgtacctggaaggaaagcagcacggctggaaactgaatacgaaagcagctgagctgatctacgcgggtatcgtcggtgatacggggcgcttcttattcccgaacaccacaaaaaagacattaaaatacgcgggagagctcattgagttcccattttcatcgtcagagctgttcaatcaattgtatgaaacaaaattaaatgtggtgaagcttaacggctttatttatcaaaatgtgtcactgtctgaaaacggcgtcgcttccgtgttcattaaaaaagacattttggagacatatggaaccaccgcttctgaagcgtcgcagcttgtcggaacactcggaaatatttcgggtatccgcgcttgggtgtttttcgtagaagaagacgatcaaatcagagtccggttccgttcaaaaggtccggtcatcaacggaattgcccggaaatacaatggcggcggacatccgcttgcggccggcgcatccatcttcagctgggatgaaaccgatcagattcttgctgatctggaagaggtatgtaacgaacacaagtagaggggagaccctctttcttagtgttcatctgtcacggggatgaaccagcagccgaaatcagtcaggtcttcgtagacgcggagattacagatttggagttctttttttatgagggaagcgagtgtgtctgtttctgcatatgcggaatagccttgtctgattcgggctgcatgatcttttgccaagcgtcgttcactaaaaacctccattttcccttcctcccttcagaatcattgaaaatgtctcatttacagtttataaaaaagcggagaaaaaagcgacagatctatggaaaatttttaaaaatgacataattacgtcgcaaaagaaatatgaatttcgacagacaatctcgtataaatcgtcagttcctttacttcagctttaaattccttctcatttatggtgtatattttgttttcgatcgtccgttttaaaagctcctttgttttatacacgctttcaatatcttttgtgatgacttcagaaatattatctttcacttgttcctcaaatttcatcttgtcaggctgggcgattctgtatttttccccattgatcagcttcacatcaacactttggatgagaagtctttgcttattatcctcatttaatttatgaagatccttctgatagatggagatttggttttttaaatcccgcgcgtgctcacgctgcttttcaattaacgtcacttgttcttcctgaaacgttccgtatgtaaacagaaagaacagccagctgacgatggctccgcacatcattcccgcgaaaaaacgctgccatcccggttttttataatactcgggaattctcatgatgacatattctcctgggtcagccatgaaatgatcagccagccggtctgcgcgccgcccattgctgaaataattaaaagaagctgtttgaagatgtcgcgcgtgttgccttcgaacagcccccgctcgaaactgtataccgcgtcaaatgttcccccgatggccgcgacaagcgcccagatcttcagcctgttcgccaattttgtgatcgccgtcagcggaggctcgcctgataaataagctccgaggccgccgatcagcgcgccgccgagcaacacaccgagggcgataaaataactgctgatgaaattcgccataaatccggcttcctgatccatatatacaccacctcacttttctatcatattgagcgaaacggacaagtatgatgatgagtcaaaaaagaacatttgtttcttaagaaaacccgtcttataatgtagaaaggcaaaatgaacgtatgggaaaggagtggcggcattgtcttttgttcacctgcaagtacatagcggctacagtctgttaaacagcgccgcttctgtaaaagagcttgttacacaagcgaaggaactcggatattcatcattggcgctgacggacgaaaatgtgatgtacggcgccattgagttttataaagcatgcaaatcaaacggaatgaagccgattatcggtctgacggcttctatatacacggacgatacggagcttgaagcacatccgctcattcttttagcagagacaaacatcggatatcagaacctggtgaaaatctcaagtgcgctgcaatccatggcaaagggcggcatgaagcgaaaatggatgaagagctatcatgaggggctgatcgccattacgcccggtgaaaatggctacattgaaagcctgcttcaagccgggaagtttgaagaagcggtccgggctgccgaaggattccgggagctgttcggagacggccgtttttatttagggtatcagccgtttaaaggacatgagacgttatcagaagagattctccgtctgtcagccgagacggaaatcgctgtctgcgctgcgggggatgtccgttatatcaagaaagaagatcaagatgcgtaccgctgtctgtgcgctattaaagccggagagaagtgggaggatcagagcgggaatctgccggacttatacttgagggcgcctgaagaaatggcagagctttacacgcggcatccggaagcgattgaagcagccgcgcgtatcgcccggcaatgccgggtcgatgtcagcctcggacagacacagcttccgtcttttccggcgccggacggcaaatcagccgatgactatttggcggagatctgtcatgaggggctgcgcctccgtttcggcactcctgatgagcgcgctgtccgccggcttgaatatgagctggacgtcatcaggcgcatgaaattcagtgattattttctcatcgtatgggactttatgaagtacgcgcatgaaaagggcattgtgacaggcccgggaagggggtccgcggcaggctcgcttgtcgcttactcccttttcattaccgacgtggatccgcttaaacattctctgctgtttgagagatttcttaatcacgagcggatcagcatgccggatattgatatcgatttccctgacacgagaagggatgaggtcattcagtatgtacaaaataagtacggggccatgcacgtcgcccagattatcaccttcgggacattggccgcaaaggcggcgttaagggataccgggagagtgttcggaatcagcccgaaagaagccgaccagcttgcccgcctgattccgtcaaaaccgggaatgacgcttgatgaagcgaggcggcagtccgctcagctgaacaggaggctgtccgaatccgccgttcttcataaagtgtttcagatcgcaaggaaaattgaaggtcttccgcggcacacgtcaacacacgcggcgggggtcgttctcagtaaagagccgctttctgaagttgtccctcttcaagaagggcatgacggcgtgtatttaacgcagtatgcgatggatcacttggaagatctcggtcttttaaaaatggactttttaggtttgcgcaacttgacgcttattgaatccattaaaacgatgattgaaaaagagacgaatacgaaaattgatttttccgagatttcttatcaggatgaaaaaacgttctcgctattgtcaaacggtgatacgacgggtattttccagctggaatcatcaggaatgagaaacgtgctgaagcgcctgaagccgtcaagactggaagacattgtcgcggttaacgcgctttacaggccgggaccgatggaaaatattccgttatttatcgaccggaagcacgggcgggcgcgtgtggaagtgccgcacgaggacgtacgaaatattctcagtgacacttacggcgtcatcgtctatcaagagcagataatgatgatcgcctcgcgcatggcagggttttcattaggtgaagcggatctgctcagacgggctgtcagcaaaaagcaaaaggacattctggacagagagcgaagccattttgttgaagggtgcttaaaaaaggagtattctgtagtcactgcaaacgaggtctacgatctgattgtaaaattcgctaactacggattcaacagaagccatgctgtcgcatacagcatgatcggctatcagctcgcctatttaaaagcgcattatccgttatattttatgtgcgggctgttgacgagcgtcatcggcaatgaggacaaaatatcgcaatatctgcatgaagcgaaggggagcgggattcaagtccttccgccgtcaataaacaaaagcggttttccgtttgcgccggaaaacggagccgtcagatacagtttgcgggccgttaaaaacgtaggcgtctcggcagtgaaagatatttataaagcaagaacacataaaccgttcgaggatcttttcgatttctgctttcgcgtacctgcaaaaagcgtgaatcggaaaaccatcgaagcccttatattttctggcgccatggacgaattcaatcaaaatcgcgccgccttgctggcctccgttgatgtggctttagagcacgctgaactttttcgtgcagacgatgaccaaatgggattgtttttggaagaatcgttctccattaagccaaaatatgtagaggctgaggaatttccgctcgtggacaagcttcggttcgaaaaagaagctctcggtgtttatttctcgagccatcctttatctgctttcagggatctcctgaaaaaacggggggcgcaagcgatcacagcagcgcggcagatgccgaaggggcagctgtcaatcggcgctttgctcgcgggcatcaaaacgattcggacaaagacaggtcagcatatggcgtttctcacattaagcgatgaaacgggagaaatggaagccgtcgtgtttcctgaccaatatagaaggctgtctccgctgttaaaggaaggcgcgctattattcgccgccggaaaaatggaagagcgtcaggagaagacacaattcatcatgtcatccgcctctcttcttgagcagacggaggcagacagagcgccgtctgtttacatcaaaatcgaaggcagccggcacaatcaggagtttttggaaaagatgaagcgtattttactggagcataaaggggaaaccggcgtttatctatattatgaaaaagacaagcagacgatcaggctgccggatacttttcatattcaggcggaccatcaggcgttataccgtttaaaagagctgctgggccgcgaaaacgtcgtgttaaaatagtggtaacaataatcgttttgttatacaattgaaacaattgtgctatcttatttaaagattctgaaatttttcacctccagcgattgtaccagtctatgcggcagaatatgtaacaaagtacttaaaaggagtgtttagaatgtcattaagagaagaagcgttacatttacacaaagtaaatcaaggaaagctggaatcaaaagcaaaggtagaagtcagaaacgcagacgacttaagccttgcatactctcccggagtagctgagccttgtaaagagatttatgacgataaaaacaaagtatatgattatacaatgaaggggaacatggtagcagtcgtaacagacggatcagccgttctcggactcggtaatatcgggcctgaagcttcacttccggtcatggaagggaaagcggtgctgttcaaaagtttcgcgggcgtggatgcattcccgatcgcgcttgacacaaacgatgtggacaaaatcattgacactgtgaagctgcttgcaccgacattcggcggagtcaaccttgaagatattgcggcgccgaactgcttcattatcgaagagcgcctgaaaaaagaaacaaacattccggttttccacgatgatcagcacggcactgccatcgtaaccgttgccggacttgtaaacgcgctgaaattatcaggaaaatccatgtcatccattaaagttgtggcaaacggagcgggagcggcaggcatcgcgatcatcaagcttctttaccatttcggcgtacgcaacatcgtaatgtgcgactctaaaggggcgatttacgaagggcgtccggccggcatgaacgcagtgaaaaacgaagtggcgaagtttacaaaccaagaccgcaacgacggttcgctgcaggatgtcattaaagatgcagacgtctttatcggcgtatcagtcgaaggcgcgctgacgaaagaaatggtggaaagcatggcgaaagatccgattatcttcgcaatggccaacccgaatccggaaatcatgcctgaagacgcgcgcgcagccggcgcaagcgtaatcggaacaggccgttctgatttcccgaaccaggtcaacaatgttctggcattccctggaattttccgcggggcgcttgacgttcgcgcgactcacatcaacgaagaaatgaaaattgctgcggttgaagcgattgcttcccttgtttcagaggaagaattaagcgctgattatgtcatcccggctccatttgacaaacgtgtggctcctgccgttgcgaaagctgttgcgaaagcagcgatggaaacgggcgtcgccagaattacggtcgatcctgaggaagtggctgaaaaaacaagacagctcacggttatcggcgaataataacacaaaaatgaaatggcagcgcgttggaaaaaaacaacgcgctgctgttcaatatacggactgctggcatttttttaagggcaggtcttaaaaaaatttcagcagaatccttatttcttttgaaaacgctgacagataaggctgaacaacgctttttacggtatgaaatccgtccgtttccgtctgttttgcagcaaaaaatgtcgaatggaggatgacaccgtttgacaaaaaaagtacaatagtttcggtaaagttattattaagtctatctaatcggaagacatgcagtgaagagaacccttcacaaaagggaggtaatcatttgttaaaggatatattcacaaaaaagaaaaaatatgcttccgtgccgtctgagcaggcaaaacatgatgttccggaaggcattatgacaaagtgccccaaatgtaaaaaaatcatgctcacaaaagagttagataaaaacctgcgcgtctgcatgaactgcgggcaccatttcccgatgaatgcaaagcagcgcattgaaagcctcctggatgaagattcattcgaagaattcaaccagggaatgatatctgaaaacccgctcggtttcccggaatacttagaaaaaatcgaaaaagaccgtgagaaaacatcgctgaatgaagcggtggttaccggaaaaggaaccatcagcggattcccggccgtgatcgcgatcatggattcaacattccgaatgggcagcatgggttcggttgtcggcgaaaaaatcacgcttgcaattgaaaaagcaaaagaggaaaaagtcccgtttatcatctttaccgcttcaggcggcgcacgtatgcaggagggggtcttaagccttatgcaaatggccaagacaagctctgcattaaaactgttcagtgaggagcagggactgattatttctgtcatgacccatccgacgacaggcggcgtatcggccagtttcgcgtctctcggtgattataatttcgctgaaccgggcgccttgatcggatttgccggaagacgtattattgaacagacgatcggggaaaaactgccggaagatttccagacggcggaatttttattaaagcacggccagcttgatgcggtgattcaccgaaacgacatgaaagacaaactcgcatttctgctggacatgcaccaaacaggaggtgagcatgagtggctgcaagattagaatttgaaaaaccagtgattgaactgcagacgaaaatcgccgaactgaaaaaattcacccaagattcggagatggatttaagcgctgaaatcgcaaggcttgaagaccggctcagcaagcttcaggatgagatttataaaaacctgaagccgtgggacagagtgcagatcgcacgccttcccgaccggccgacgacgcttgattacattcaatacctgtttaccgacttttttgagtgccacggagacagaacatacggagatgatgcggcgattgtcggcggagtcgccaaatatcacggcatgccggtcaccgttatcggacatcagcgcggaaaagacacgaaagaaaaccttgtccgcaatttcgggatgcctcaccctgagggctaccgcaaagcgcttcgtctcatgaagcaggcggataagttcaaccgcccgattatctgcttcatcgacacgaagggagcgtacccgggtaaagcggcggaggaacggggacaaagtgaagccatcgccaagaacctgttcgagatggccggcctgaaagtgcctgtcgtttgtatcgtcatcggggaaggcggcagcggaggcgcgcttgcgttaggtgtgggcaaccgcatgctgatgcttgagaactcgacgtattccgttatttctcctgaaggagccgcatccattttgtggaaagactccagccttgcgaaaaaagcggccgaaaccatgaagattactgcgcccgatttattagaattaggaattattgatgatatgattaaagaagtgaagggcggagctcaccatgatatcaagcagcaggcgggctacattgacggtatacttaaagaaacgttaaaatctcttcttcaattgaacgccgaagaattgatctcacagcgatatgaaaaatataaagcaatcgggaaagtttcggttgaggatcaatatatcggggtaaactgaatagacgtgaagcctatggctcacgtttattttttgtgatttttgtgatattccttaaattttatttaaaaacaatttatttaattgtataataggtaaggtttcatgggagctcaggcgtcccttttcattgttttagggcaatgatcatgatatgtttaacatatatatgttgctgaggtgaataggaaatgaagcgtataggagttttaacgagcggcggggattccccgggtatgaacgctgcggtgcgcgcggttgtgcggaaagctatctaccacgacgtcgaagtgtacggaatttataacggttattcaggattaatcagcggtaaaatagagaaactggagcttggttcggtcggtgacatcatccaccgcggcggaacaaagctgtacacggccagatgtcctgaattcaaaacagttgaaggccgtgaaaaaggaatcgaaaatttaaagaaactcggcattgaaggtcttgtcgtcatcggcggagacggttcatacatgggtgcgaaaaaattaacggaacacgggtttccgtgtgtgggtgtaccgggtacgatagataatgacatcccgggaactgattttacgatcggatttgatacggcgctaaacaccgtaattgatgcgattgataaaatccgtgacaccgctacgtctcatgagcgtacatacgttattgaagtgatggggcgccatgcgggcgacattgctttatgggcaggtcttgcaggcggagcggaatcaattttaattcctgaagcggactacgatatgcaggaaattatcggccgtttgaagagagggcacgaccgcggcaaaaaacacagtatcatcatcgttgcagaaggggtaggcagcggggttgaattcggaaaacgcatcgaagaagaaacgaaccttgaaacacgggtatccgttttagggcacatccagcgcggcggatctccaagcgcttctgaccgggttcttgcaagccgcctcggcgcttacgcggttgagcttctgcttaaaggaaaaggcggacgctgcgtaggtatacaaaacaacaagcttgtagaccatgatattatagaaattttagaatcaaaacatactgttgaaccaaacatgtatcagctttcaaaagaactgtctatttaaggcggaagaagctgaagatttcagaaggaagtgaacgagttgaaaaaaacaaaaatcgtttgtacaatcggtccggccagtgaaagtgtagaaatgctgacaaaattgatggaagcgggtatgaacgttgctcgtctgaatttttcacacggtgatttcgaagagcacggcgcaagaatcaaaaacatcagagaagcaagcaaaaagctcggcaaaaacgtggggattctcctcgatacgaaaggtccggaaatccgcacgcacgatatggaaaacggcgcgcttgagcttcaggcgggaaatgaaattatcgtttctacgaaacaggtgctgggaacgcttgaaaaattctcagtttcttatgaaggcctggcagacgacgtgtcagcagggtctatcatcctgttggatgacggtttaatcggattggaagtgctagaatcaaatccggaaaaacacgaaatcaaaacaaaaatcttaaacagcggcacgctgaaaaataaaaaaggcgtaaacgttcccggcgtcagcgtcaaccttcccggaattactgaaaaagacgccaaagacatcgtattcggtatcgagcaaggcgttgatttcatcgctgcgtcatttgtacgccgttctacggatgtccttgaaatccgcgaactgcttgaagagcataacgcgtctgacattcaaatcattcctaagatcgagaaccaggaaggcgtggacaacctggacgcgatcctggaagtatctgacggcttaatggtagcgcgcggagacctcggcgtagagattccggccgaagaagtgccgctcgtgcaaaaagaaatgatcaaaaaatgcaacgcgctcggcaaaccggttattactgcgacacaaatgcttgacagcatgcagcgcaaccctcgtccgacacgcgctgaagcaagtgacgttgccaacgccattttcgacggcacagacgctatcatgctttccggtgagacggctgcgggacaatatcctgtcgaggcggttcaaacaatgtttaacatcgccacacgcacggaagaatctctgaactacaaagaaattctgtctaaacgcagagatcaggtcggcatgacgattaccgatgcgatcggccaatcagttgcgcacacggcgatcaatctgagtgcggcagctatcgttacccctacagaaagcggccatacggcgcgtatgatcgcgaaataccgtccgcaggctccgattgtagccgttacggttaatgagtctgtatcacgcaaactcggtcttgtattcggtgtattcccggcaagcggccaaaacgcgaattcaaccgatgaaatgcttgaagacgcggttcaaaaatcacttgacagcggcatcgtgaaacgcggtgatctgattgtcattacagcaggttctgtcggtgaatcaggcacgacgaatctgatgaaagtccacactgtcggcagcgttatcgcgaaagggcaaggcatcggacgcaaatctgcattcggtccggtcgttgttgcaaaaaatgcgaaagaagctgaacaaaaaatgacagacggcgcagtattggttgcttcaagcactgaccgcgacatgatcgcttcacttgaaaaagcatcagcgctcatcactgaagaaggcggtctgacaagccatgcagccgttgtcggtttaagcttgggcattccggttatcgtcggtctggagaacgcaacttcagttttaacagaaggacaggttatcacagttgacgctgcccgcggcgctgtgtatgaaggccgcgcaagcgttctttaaacagctttaaaaaagagaggggggttctcccttctcttttgtctttaggtttattttcctattcccatgcgggcggtgacgcgcttttagaagggcaggagggcagaaaaatgagagtgttattcttactgtttatcgtgtgtccggcaattgaaatcggtttgtttctgctggcgggaaaatggctcggtatttttccgaccttccttctcatcattttgacaggcgtgttaggcgccttggtggcaaaaagacagggaaccgatgtgtatcatcgggtgatgcgcgacctgcagcacggcaaaatgccgggggaagcgcttcttgacggaatatgcgtctttttcggaggcctgcttttgatgcttccgggttttctttccgatattgcaggggcctgtcttctgattccgttcactcggaaccgcatgaagccgcttttgttcaaatggctgagaggaatgtcaaaaaacaagcggatcattatcaaataaaaacggcagccttcttacagggctgctgtttttatttggactgaacagtaatataggcccatatttcttttaaagcgcccgttgtgataaaggcctgaatgaaaacgagcagcgcgggccccgcagccagtcctaaaattccgaacaatttaaagccggcaaacagagcgattaaggtcgcaagcggatcaagtccgattgacttgcttaaaattttcggctccgtcagctggcgctggataagaaccacaatatataaaacaccgagaccgatcgcttgaggaagctgaccggcaatggccaaatacataatccagggaacaaagaccgatccggcgccgagatacgggagcaggtccaccaggccgataaaaaaggcgatggttgccgcatgctcaatccctaaaagaaaaagtccgataaagacaatgatcatcgtgaaaagtatgagcacggcctgcgccttaatgaaacctgccatcgcttttttcagctctcccgatacggccttggcgtttgccgaaacccgttccggaagaatggaataaagcagcgccttcagcttatgccagtcctttgtcataaaaaaagtcgccagcattgcgaaaatgaagacggcagctgtattgggaaggaaggcaatccatttcggcaccagctccaaaagatgtgaaagcatcagccccgcatttttagcggctgtatcaccgagggtctgaatatgcgtcacgatggatgcctgctgattggtttcaagcccgttaaataagacggtcagctcgtggtacaatggctgaatgcgggaagtgaacagctcttcgcaatacgtcataaaggcgctgatatggggagggagcgttttggccagataggcggttcccgaaatgatttccgcaacgagaaatgtcgccgcgccgagaagaataagcaaaaagaagaccaggacaatgactgtattgactgaccggggcagccccgtcagtttgtccagccagtcaacaacgggaatgatcgctgatgacagaataagggcgatcagaaacggataagttaacggaaatgaggcgtaaccggccgctaaagcgccgccggccgcagcgagtacaaacagcgcgcggaaaaaaacagttgcatagtgcggattcacatcgatcctcctctcgatggcacgtcctattacattagtttattcgtcaaaaaaaaggatatgaatacagatatgatgaaagagggtgctttcaggatgtttacacaagcgaatttatttttactattattgctggccatcgcattgatagccaaaaatcagtcattgctttttgccgtcggctttctcattgtgataaaagctgtcggtcttgatcagaaactatttccggttattcagtcaaaaggcatcaactggggggtcaccgtcattacaatcgccgttttagtgccgattgccacaggtgatatcggttttaaacagctcggagaagcgatgaaatcatattatgcgtggatcgctctcggtgccgggatcgcggttgccttaatcgccaaaaacggtctcaccttattggaaaacgaccctcatattacaacggcgctggtcatcggcacgatacttgccgtcgcgcttttcggaggcgtcgccgtaggcccgttaatcggcgccggaatcgcctacttggccatgcaaatcgttaaaatattcacttcgtaaagtaaaaaagcggcgtaaagctgctttttttgtggagaaaattagagtttgcacttgcgcattttgtagttcagacaaatgccatttacattattccgatgaatgaagcggcttaccatgtaacaaagagcttcgggattgacggcgcacatggagcgaaaacagcgattgcagtagattaaaagctgatgggatttatgggcctgataccaaagcaaaacttgaagtgttgttaaaataagcggagaccctttccttcaatttgaaagtttgttaaatttataatgagaatgaaaaaacacaattcggttggtagtccggatgcatgatttaaaatgtcagtaaccttcccctcctcgggatgtccatcattcttcagtaaatttaggaggagggaatcgttatgaaattaacggtttactacgatggtcagttttgggtaggagtcattgaagttgtgaatgacgggaaattaagagcaattcgtcatttgtttggacaagagccaaaggattcagaaataatgcattttgttaataatcaacttttacagactctctcccacactgaacaagaaggggtttgtgttaaagcaaaatctaagaaattaaacccaaaaagattgcaacgacaagcttctaaagaaatgaaaaatatcgggatatcaactaaggcacaaaaagcgataaaacaggagcttgaagcaagaaaagaaaagaaaaaacaactgaacagaaaacaaagagaaaaaataaaggaacaaaaatatttaatcagaaaacaaaaagcaaaagaaaagcataggggaaaatagttggagagcccgatgaagcccttcgattgaaaagttgagcggcatcagttagtttcttcggactgatttagagaaaaagaagtataagtcagagctcttctcgagatgaggagggtttttctgccatttatttaacttcacttacatcagtaaatgagtcagtttcaattgatgaacggtttgataaggatatttacgggctgactgcaaaagcgaaaatcttgtcttagctgaagtaataataaactctctatttttatgaagggagatgattaatttgaaaaaataattgtattgttgatcttatgtttttcgttaagctctatcacagtggctgctgctaaacaagaacatcgccagaacccaaaagattctcaagagctatttgatgtttttatgcaagaacttttatgtaaagatatattagacaatgtccgtaaattctataaggctgccactaagagactttaatgggaaggctttatattatagcaaggacaatattttcgtctttgtctttggcccataaatgccatcagcagtcaggccgtacatggactggaatcgtttgactgctttgctgttttcgggccgatgaaattgagaactctgtcccattcatattattcactttcctaagaaggggattaaatttgcggtgaagttgtcgcgcctgtccttttaaagtctcctccaaaacacccccaaatgaaaacatgagaatacatggttttacaaagcgcctgaaagcaagcgattaaatttatcaacgcaaaaccttgatatatagggcttttaaaacatttttagttaaaagtctacaaattaatcagattattgtttataataagaataggcttaaacttaaataagcttataagaatttgttatgttcctctataagcatatcggttatgtaaccgcaatcagtgaaatgtaagcattttcttaaaggggaaagggattgtttgcatgactcattttaagtaagccgtatgttttatatactctttaaaggggaattttgattgaaaaggagaggttgaatatgacagcaacacgcggtcttgaaggggttgtagcaacaacatcatctgtaagctctattatcgacgatacccttacatatgtagggtacgatattgacgacttgacagagaatgcaagttttgaagaaatcatttatttgctgtggcatctgcgcctgccgaataaaacggaacttgctgaactgaaaaaacagcttgcgaaagaagctgccgttccacaagaaatcattgagcacttcaaatcatatcccctcaataacgtacatccaatggctgcgctccggacggcgatttcattactcggtctgactgacagtgaagccgatgttatgaatccggaagcgaactacagaaaagccatccgtctgcaggcgaaagtgccgggcattgtcgccgctttctcaagaatccgcaaaggacttgatcctgttgaaccgaaggaagagtacggaatcgcggagaacttcctttacaccttaaacggtgaagagccttctccgatcgaagtggaagcgtttaacaaagcgctcattcttcatgcggatcatgagctgaacgcatcaacatttacggcgagagtatgtgtcgccaccttatctgatatttactcaggcatcactgccgccatcggcgctttaaaaggaccgcttcacggcggagccaatgaagccgtcatgaaaatgctgacagaaatcggcgaagtggaaaacgccgagccttatatccgcagcaaaatggagaaaaaggaaaaagtaatgggcttcggacaccgtgtgtataagcatggagacccgcgcgccaaacacttaaaagaaatgagcaaacgcctgacgaatctgacgggggaaagcaaatggtatgagatgtcaatccgtgtcgaagaaatcgtgacgtcggagaaaaaactcccgcctaacgttgatttctattccgcatctgtataccacagtctcggcattgatcacgatctgttcacgccgatctttgcggtcagcagaatgtcaggatggatcgcccatattcttgaacagtacgataacaaccgcctcatccgcccgcgcgctgattacacgggtccggataagcagacttttgttccgattgatgaaagagcctgatcaaacgggaggctggtgattttcatgtcgttagcctcttgttaatcaagcccggattggtttacaattttgatagaatcttgagaaaagtcattttattttctatacaagaaaaataaaatgttttctaaatatgaattacatactgggaggtaatattgtgtcacaaggtgaaaaaattacagtctctaatggagtattaaacgtaccaaataatccgattatcccgtttattgaaggcgacggcacaggccctgatatttggaacgccgcttctaaagtattggaagccgctgttgaaaaagcatataaaggcgagaaaaaaatcacgtggaaagaagtttatgccggtgaaaaggcttataataaaacaggtgagtggcttcctgccgaaacgctggaagacatcagagagtacttcatcgccatcaaaggtcctctgacgacaccggtcggcggcggtatccgttctctgaacgtggcgctgagacaggagcttgatttgtttacgtgcctgcgccctgtcagatatttcacgggagtgccttctccggtcaaacgacctgaagatacggatatggtcattttccgcgagaatacggaagatatttatgccggaattgagtatgcgaaaggttctgaagaggttgaaaagctgatcagcttcctgcaaaatgaaatgggtgttaacaaaatccgtttccctgaaacgtcaggaatcggcatcaaacctgtttctgaagaaggcacaagccgcttagtcagagctgccattgagtatgcgatcgaaaacggccgtaagtctgtcacgcttgtccacaaaggaaacatcatgaagttcactgaaggggcatttaaaaactggggctacgagcttgccgaaagagaatacggagataaagtattcacttgggctgaatatgaccgcattgtcgaaaaagacggaaaagaagctgctgataaagcgcagagcgacgcggaagcggcaggaaaaatcatcgtcaaagacagcatcgctgatattttccttcagcagatcttaacccgtccgagcgaattcgacgtcgtggcgacaatgaacttaaacggagactatatctctgatgcgcttgccgctcaggtaggcggaatcggaatcgcgccgggagcgaacatcaactatgaaacagggcatgcgattttcgaagcgactcacggaacggctccaaagtatgccggccttgacaaagtcaacccgtcatccgtcatcctttcaggagtgcttcttcttgaacacctgaactggaatgaggctgctgacttgatcattaaatctatggaaaaaacgattgcttcaaaagtagtaacgtacgattttgctagattaatggacggcgcaactgaagtgaaatgttcagagtttggtgaagagctaattaaaaacatggactgaacctaaagcagacttctaatgaagccaaaaaaggagaagagaatcatgggaaaaacacgcagtaaagtttctgttatcggagcaggatttacgggagcgacaacagcctttctgacagctcaaaaagagcttgcggacgttgtgctcgttgatattccgcaattagaaaacccgacaaaaggaaaagcgctagacatgctcgaagcaagtccggtccaaggatttgacgcgaaaatcacaggcacgtccaactacgaggacacagccggttctgatatcgtcgtcatcacagccggaattgcgagaaaaccgggcatgagccgtgatgatctcgtatctacaaacgaaaaaatcatgagaagcgtcacacgtgagatcgtgaaatattctcctgactgcattatcgttgtattgacaaaccctgttgatgcgatgacatatgcggtgtacaaagaatcaggcttcccgaaagaacgcgtcatcggacaatccggagtgcttgacactgcacgattcagaacattcgtcgctgaagaattaaacctgtctgtaaaagatgtgaccggttttgttcttggcggacacggtgacgacatggttcctctcgtccgttattcctatgcgggcggcattccgcttgaaacgcttatcccgaaagaccgtcttgatgcgattgtagaacgtacaagaaaaggcggcggggaaatcgtcaaccttctcggcaacggaagcgcctactacgcgcctgctgcatcactgactgaaatggtagaagccattttgaaagatcagcgccgcgtgcttccgaccatcgcttacttagaaggcgaatacggtcatgaaggcatttacttaggcgtaccgacgattatcggaggaaacggcctagagcaaatcatcgagcttgaactgacagactatgaaaaagcgcagctgagtaaatcagttgaatctgtcaaaaatgtgatgaaagtattgtcataagaaaaaagggaaggcttccgaatcagaagccttcctctttttacaattaatgaaagcgttttctttttccctgagcgatcctttctctgaaaatgatcaaaaaggcgaattgtctgaacgggcagtattggataaaatgaaatcataaagtgatatgcagcacataaaatagagaaaattggatgtcggggaaaatagacagcggagggcgcagcatgaacaaaaaaattttagttgtagatgatgaacaatctatcgttactcttttacagtataatctggaacggtccggctatgatgtcattaccgcatcagacggagaagaggctctggagctggcagagaatgaaaatccggatttaatcgtactggatgtcatgctgccgaaagtggacggaatcgacgtctgtaagcagctcagacagcagaaaatgatggtcccgatcttgatgctgacagcaaaagatgaggagtttgataaagtgctgggactggagctcggagcggatgattacatgacaaagccgttcagtccgcgggaagtcactgcgcgggtgaaagccattttaagaagggctgacatttcttcgctgtcacaaggcagagaagaggaaaaggacgggcagatcctcatcggcgagctgaaaattcttccggagcattacgaagcgtacttcaagtcagaacagctggaattgacgcctaaagaatttgaactgcttctgtatttgggaaaacataagggaagagtgctgacgagagatcttctgctgagcgcggtctggaactatgattttgccggggatacccggattgttgacgttcatatcagtcatctgcgcgacaaaatcgaatcaaataccaaaaaacccatctatattaaaacaatcagaggtttggggtataaactggaggagccaaaaatgaatgaataaagtccgtgtgcgtctgttcgctttactcgttgtatgtatcatattggttttcagtgttctcggcctttttttacagcagcttatttcttcatccgctgaagaaagaacggcggatcagctgaaaaaggaatcggtatacatagcgggccttcttgacaccggccgaatcggcaataaaagcaatgaaacggtaatccgtgacgccggccgcaccctcggtataaacgtcgccgtgctcaatgagaagggtgacgccgtatatcattccggcagtcatgctgatgattcagccgtaaaggagttcatttctcacaataaaagcgaggaagccgtacagtcgaaaagcaaagtcatccgcggcactgccgtaaaaaatgacgccgggaaaattgcggggtatgtactcgtttcctctgagatcaacggcggttcaagcgttaccggagaaatgtggggcatgctggcagcaagtctttgtaccgcttttatcattatcgttttcttttatacaaacatgacgtcccgttacaaaaaatcaatcgacgccgcgacaaaagtggcgacggagctgtccaaggggaattatgacgcccgctcctacagcggttacgcaaggcggtcggaccgtctcgggcgtgcgatgaacagcctggcggtcgatttaatggaaatgacgagaacgcaggatatgcagcgcgatcgtctgttaaccgtcattgaaaatatcggatccggtttgattttaatagacgggagaggttttatcaatctcgtgaaccggtcatacacgaagcagtttcatacaaagcctgaacgtctgcttcggcgtctttaccatgatgcgtttgaacatgaggagatcattcggcttgtcgaagacatttttatgacggagacgaaaaaatgccagctgctcagacttcccatcaacattgagcggcgctactttgaagttgacggcgttccgatcatgggccctgacgatgaatggaagggcatcgtcctcgtctttcacgatatgacggaaattaaaaaattggagcagatgagaaaggacttcgtcgccaatgtctcccatgaactgaaaacaccgatcacctcgattaaaggctttacggaaacactgttagacggagcgatgaaagacgaaaaggcgctttcagactttctgtctatcattctgaaagaaagtgagcggctccaatctctcgtgcaggatttactggatttatccaagatggagcagcaaaactttacgatgcgcgtagagtcctttgacgccgcaaaaatcctccatgaaatcgaagcccttttacagcataaggctgaggaaaaaggcatcagttttcagctcgatcttccggaggagccgatttttgtgatgggtgatgtgcacaggctgaagcaggtattcctgaatctggcgaacaacgctttaacctacacgcctgaaaaagggacggtggcgatttcggtaaatgtgaaagaaaccgctgtcgatatcaaagtgtccgatacgggaatcggcattcagaaggaagagattccgcggatatttgagagattctaccgcgtggataaagacagaagccgcaactcgggaggaaccgggctcggtcttgccatcgtaaagcacttaatagaagcccatgaaggtaaaatcgaggtcacaagcgagccgggacaggggactgtatttaccgtgacgctgaagcggcagccggaagcgtgatcagctttacaaaggattaacaatttcttcatgacctgttaaacctatcttgttaggatgtaacagaaccccttcatccaaggagccaattttgacggcgggaacgtgttttcttgttcccgtccttttttgcgttttcacggggttcgctcattttcctttcaaattgaactttgttaaaataagagaagctgtgagattaaaaaatagaggaatgacgagcttttgctcttaggaggatattgaatgacggaacgaaaaaaattagtgcttgtcgacggaaacagtctggcgtaccgagcgttttttgcattgccgcttttaagcaatgaaaaaggcatccatacaaatgccgtatacgggtttgcgatgattttaatgaaaatgctggaagatgaaaagccgacccacatgctggtggcttttgatgcggggaaaaccactttccgccacagcacgtttaaagaatataaaggcggaagacaaaaaacgccgccggagctttcagaacagatgccgttcatccgcgagctccttgatgcctataacatcagccgctacgagcttcctgaatatgaagcggacgatattatcggcacccttgctgtatctgctgaaaaagaaggcttcgaagtaaaggtagtttcgggggacaaggacttaacccagcttgcaaccgggaaaacgaccgttgccattacgagaaaaggcattactgacgtggaagattacacgccggagcacgtgcaagaaaagtacggtctgacccctttgcaaatcattgatatgaagggattaatgggggattcatccgataacataccgggcgtccccggcgtcggagaaaaaaccgcgattaagctcttaaagcagttccattcggttgagaaactgcttgattccattgatgaagtcagcggaaaaaaattaaaagaaaagcttgaagaatacaaggaacaagccctgatgagcaaagagctggcgacgattatgacaaatgcgccgattgaagtcaagcccgaagatttaggttaccaagggtttgaccgtgaacaagttgttgccatttttaaagacctgggttttaatacgcttcttgagcggctcggtgaagaaagcggggaaacggcggaagaaaattttgaagacatcaatgtcgaaatggcagaagaaatcaccgaagatatgctcgtttcgccgtccgctttggtcgtcgaacaaatcggtgataactatcacgaagaaccgatcctcggcttttccatcgtgaatgaaacaggtctttattatattccgaaagaaatcgccattcagtctgaagcttttaaatcttgggctgaagatgaatcgatgaaaaagtgggtgttcgacagcaaacgttccgtcgtcgctttgcgctggcagggaattgagctgaagggaacggaatttgacgcgcttcttgctgcctacattataaacccgggcaattcgtacgacgatgtcgcgagcgtagcgaaagaatacgggctgaatatcgtttcaaaagatgaagcggtctacggaaaaggcgcaaagcgcgccgttccggctgaaaaagagcttgccgatcatctcgcgcggaaagcgtctgccgttaacagcctccgtgacaaactgctgcacgcgctggaagaaaataatcagcttgaattatatgaagatctcgaactcccgcttgcgctaattctcggagaaatggaatcaatgggcgtcaaagtggatgttgaaagactgaagcgaatgggcgaagagctcaaggcaaagctgaaagaatatgaagaaaaaatccatgacatcgccggtgagccgtttaacatcaattcaccaaaacagctcggcgtcattctgtttgaaaagctcggcctgccgccagtaaagaaaacaaaaacaggctattccacttcagccgatgtgcttgagaagctcgcagacaaacatgatatcgtcgcgcacattctgcaatacagacaaatcggcaaactccaatcgacttatattgaagggctgctgaaggtcacgcgcaaggattctcataaggtgcatacacgattcaatcaggcattgactcaaaccggacgcctcagctcaacggatccgaacctgcaaaatattccgatccggctggaggaagggcggaaaatccgtcaggctttcgtaccgtccgaaccggactggcttattttcgccgccgattattcacaaattgaattaagggtgcttgcgcatatttcaaaagatgaaaatctgatcgaagcgtttacgaatgacatggacattcacacaaaaaccgccatggacgtgtttcatgtcagtgaagatgaagtgacacaagcgatgcgccgccaggcaaaggccgtcaatttcggcattgtttacggcatcagtgattacgggctgtcacaaaacctcggcatcacccggaaagaagcgggcgcttttatagaccgctatttggagagcttcccgggcgttaaggcgtatatggaagaatcggtgcaggaagcgaagcaaaaaggatatgtcacgacccttatgcagcgccgccgctatattcctgagctgaccagccgcaacttcaacctgcggagctttgcggaacggacggccatgaatacgccgattcagggaagcgccgccgatattattaaaaaagccatgattgacatggcagctgagctgaaagaaaaaaacctgaaggcgcgactgctgcttcaggtgcacgatgaattgatttttgaagcgcctaaggaagaaattgaaatattagagaagctggttcctgaagtgatggagcatgctttggcattagacgtgccgctgaaggcggattatgcttcagggccgtcttggtacgatgcaaaataaacagagaaaaaggaagtgatgattgtgccggaattaccagaagttgaaacggtccggcgcactctgaccggtcttgtgaaggggaaaacgattgaatcggcggatatcagatggccgaatatcatcaaaaaacccgccgagccggaggaattcgcgcggcagattgcaggagaaacaatccgatccatcggaagaaggggaaagtttttgcttttccatctggatcattatgtcatggtgtcccacctgcggatggaggggaaatacggtcttcatcaggccgatgagcctgacgataaacatgtgcacgtcgtgtttcacatgacggacggaacacagctccgctaccgggatgtccggaaattcggcacgatgcatttgtttgcgccgggagaggaacagaatgcattaccgctttcacagctcgggcccgaacccgatgatgaagcatttaccgctgcttatttaaaagagcggcttgcaaaaacgaaccgcgcggtgaaaacagccctgctcgaccaaaaagcggtcgtcggcctcggcaatatttatgtcgatgaagctttattccgggcgcgtattcatccagagacaaaagcgaacagtctgtcagacgggcagataaaaacgcttcatacagaaattaaagacacccttcaggaagcgattgacgcgggcgggagcaccgtccggtcttatatcaattctcaaggggaaattggaatgtttcagctcaaacattacgtatacggcaaaaaggatgaaccgtgcaaatcgtgcggcacgatgatttctaaaatcgtggtcggcggaaggggtacgcatttttgcgcccgctgccaaaaaaaatcataaactgaagcggttcaagcaggcggcagcagaatgacttttttctaacacagttgatgacctttctccatatatatattgtgattcacccaataggcatatgtcacaattgccgatcaagagaaagggagaaacggatatggagattgtttctttgctgcttttggcttttgctgtcagcttggacagtttttcagtcgggtttacgtatggtttgagaaaaatgaaaatcccgttcaaagcgattgccgtgatcgcttgctgttcagcctctgtgatgtttatatccatgctgatcggccattttctgacaaagatttttcccgtatccgtcacggagaaactgggcggactgatcttaatcggaatcggggcatgggtcatctggcaatttttcaaaccggctaaagagccggattacttattgcatgaaaaaacgttacttaatcttgaagtgaaatcgctcggcatcgtcattcatattttgaaaaaaccgaccagcgccgatattgatcaatccggaaccattaatggagtcgaggcgtttctgctcggtatcgccttatccattgacgcgtttggcgccgggctgggagcggccattctcggcttttctccggttatgatgagcgtgactgtcgggctgatgagctcgctgtttgtttcactcggcataaatgcggggcatttgctttcaagatggaattggatagataaaatgacatttttgccgggagtcctgctgattatcatcgggatttggaaaatgtaagaaggagtgggctttttgagcttggtcatcggtttaacgggaggcatcgcaagcggcaaaagcacggtagcgcgtatgctgatcgacaaaaaaataacagtcattgatgcggatgccatcgcaaaacaggcggtggaaaaaggaatgccggcttacggacaaattgtggaagcattcggaaaagacatcctgctggaaaatggcgatattgacagaaaaaaactcggttctatcgttttcactgacgaacaaaaacgtctgaagctgaatcagatcgttcatccggcggtgcgtgcggaaatgctgaaacagcgggatgaagccgttgcgcgaaaagagcagttcgtcgttttggatataccgcttttgtatgaaagcgggcttgattatcttgtcggcaaggtgctcgtcgtcaccgtaccggcagacattcagcttaaacggctgatagagcggaattcccttacagaagaagaagcgatgagccggataacgtcgcaaatgcctttagcggataaaacaaaaaaagctgacgccgtcattgataacagcggcagtcttgaatatacaaagcaccagcttgaggaagtattgagcggctgggcataaacaaacaccgttcggaaagccgaacggtgtttgtctggttaaaaatcaaaattgtcagggtccggaccgacacggaggttttcgttcagatcatcaatccgcttcatatcgtcagctgacagttcgaaatcaaagacatttgcattttcttcaatacggtgttttttcgttgatttcggaatggtgatgacaccgttttgcaaatcccagcgcaaaatcacttgagcggctgatttgccgtacttctcagcgatttcctgtaagacggtgtgatcaagcagctgaccttgcatcaatggcgaccacgcttcaagctgaatgccttgttcagtgcagaaagcaagcagttctttctgtgtcagatgaggatggtactccacctggttgatcatcggcttgatttccgtctctttcatgagatgtttcagatggtgaatttggaaattgctgaccccgatcgccttaatgcgtccatcccggtagagggtttcgagcgcccgccacgcatcgatgtactttccttcgacaggccaatggatcaaatataaatccaaataatctaaaccgagtttttctaagcttgtgtcaaacgcttttaacgtttcttcatatcctaaatcggcattccatacttttgacgtgacaaaaatgtcttcacgttttaatcccgcttcttgcagcccttggcggatgccttcgccgacaccttcttcatttccgtaaatcgcggcggtatcaacgctgcgatagccgtgcaccaatgccgttttcaccgcgttgacgagttccgcgccttcctctactttgaaaactccgatgccgaaccaaggcatttctactccgttatgcaatgttgcttttgcttgtaaatgtgttgtcatgtatatattcctcctattagttgtctgttgaaacaatcaaaatgcgctgaagaaaaactcacctcctttcaagggcagtgcgatcccgcttttcaagcttcctgctccatccggttaatacgaccgcgctgagcaccatcagcgccccgatccaagcggtatgaatgattccgattgagtctgtaatgattccgccggcaaacgagccgatcgcgattccggcattaaatgccgcgatatttaaggctgatgctgtatcaacggcgcttggcgcaaaacgttcactcagcatcacaacatatacctgaagccccggcacattcataaacgccaacagccccatgaaaataatggtgatcagcccggctgttttaaacggcgcggtaaaagtcagaacaaacagcacagcagcctggacaatgaacatataaaacaaggctttcagcggatttcggtttgataaacggccgccaatcatgtttccgatggcaatcgcaattccgtaaacgagcaggatggccgcgacggtttctttctgaaaaccggttacctcctgaagaagcggagataaatacgtaaacacgacaaacgttccgccgtagcctaacgccgtaatcataaataaaagcaataaccggccgtttgtgacgagtttgacctgctcggaaaatgcggttttcgtccctttgcgcaaatgcgacggaacgaggagcgcgtttgtgaggaatgcgatgattcctactgccacaatgacggcaaatgcgattctccatccgaattgctggccgagataggtgccgaacggaacgccggtcaccgtagccaccgtcagtcccgtaaacatgatagaaatcgcgcttgctcttttatgctccggcacgatattggcggcgattgttgccccgattgacatgaaaatgccgtgggaaaaagccgaaataacccgtgccgccagtaagacgccgattgaggaagcgctcgctgcgagtgtatttccggcgataaaaattaacatcacccagagcagcagcgttttccgcgacatgccggatgtgagagacgttaaaaccggcgcgccgaatgtcacgcccagagcatacatggaaacggtaagtcccgccgttgtcacaggtatatgcagatcttgagatataagcggcagcagcccgacgctgataaattcggttgtgccgatcgcaaaagcgctgacggctaatgccagcagcgctggtaaatagctttggcgatgtgaagacatctgttttcctccttgaacgataatgtatggttgaaatgatgccgggtaaacgatataagtataagagtacattccttttcagccggcaaatgtcattatgatcgatagaagtgtcattgaaaagaacgtacttttaagtgccataggcactttttagttcctatagatgaggaggaattaccgttgctgaagaaaaaatacaatatatccgtagaggcggcgcttgaagtgatcggcggaaaatggaagtgtgtgatcctctgccacctcatgcgcgggaaaaaacggacaagcgaattgaagcggcttatgccggacatcacccagaagatgctgacacagcaattgcgggagctggaagctgacggcgtcatcaaccggatcgtgtacaatcaggtgccgccgaaagtggaatacgagctgagtgaatacgggcacagtctggaaagaattttaaacgcgctgtgcgactggggcgcgatgcatattgctaaacggtacggcgaggtgtcttccgttttagaggacagcattttaaatgacaaatttaaagaaccgggacaaatataagaaaaaagcaggcagcctgagacgctgatcctgctttttttatggaagaaagatcattttatatgcaaaaaaaccgattgaacaacatattgatcggtataagggtggatttttatcaagttgtactggcggatttcttttaatgtgttatactatatataaataaaggtaaattagagtggcatattaaaaaggggtgacctgagcatgaaggtaaaagtagcaatcaacgggtttggaagaatcggaagaatggtgttcagaaaagcaatggaagatgatcaaattcaaataacagccattaatgcaagctatcccccggaaacgcttgctcatttgataaagtatgacacaattcacggcaaatatgatcaagaagttgagacctccgacgacagcctgatcgtcaacggaaaacatattatgctgttcaaccgccgggacccgagagagcttccgtggaaagaatgcggaatagacatcgtcgtagaggcaacggggaaatttaattcaaaagaaaaagcgatgagccatattgaagcaggggcgaaaaaagtcattttaacggctccgggcaaaaatgaagacgttaccattgtcatgggagtaaatgaagagcagttcaatcccgatgaacatgtcattatttcaaatgcatcctgcacgacaaactgtcttgcgccagtcgtcaaagtgcttgatcaggaattcgggattgaaagcggcctgatgacgactgttcacgcttacacgaatgatcaaaaaaatatcgacaatccgcataaagatctgcggagggcgagagcgtgcggagaatccatcattccgacttctactggcgccgccaaagcgctgtcgctcgtgctgcctcatttgaaaggaaaacttcacggtctcgctttgcgtgttcccgttccgaatgtgtcattagtggaccttgtctgcgatctgaaaacagatgtgtcggccgagcaagtgaacgccgctttccaaagagccgcaaaaacgtcgatgtacggaattcttgattattcggatgagccgctcgtttcttcggattataatacgaattcacactctgcgatcatcgacggtctgacaacgatggtgatggaagaccgaaaagtaaaggtgctcgcctggtatgacaatgaatggggatattcctgccgggtcgttgatctaatccgtcacgtcgccgcgcgaatgaaacacccgtcagctgtgtagactaaagatcatggacatttgttagaaaaaaacccttaacggcatattcgcaaaaaacacaccttgcaaaataaacttaaacacagtatactatctttcgtgaacttcttgctcgtgactgcttcggaattacttaaagggttaggacctctccggactaactttcccccgtggtaaatggccgggtcagttctcggaaattcacttttttaattcttgttaaggggggtccatgattatggaaacaatggggcgtcacgtcatctccgagctgtggggatgcgattttgataagctcaatgacatggattttattgaaaaaacgtttgtaaatgctgctttgaaatcaggagctgaggtgcgcgaggtcgcatttcacaaatttgcaccgcaaggcgtaagcggagtcgttattatctctgagtcacatttaacgattcacagttttcctgaacacggatatgcaagcattgatgtttatacttgtggagacctggatcctaatgtggctgcggattacattgcggacgcattacatgcagatacaagagaaaacattgaaataccgagaggaatggggcctgtacagattaaacaggcacaagcgaaagtactgtaattttcaaaacgcaaacacaagggagctaagctgaaaaagccattacgcgctttgaagctgatgctccttttctaatgtaaaaaaacagcattgctttttctttaagcattttttttgtaaaatagaaaagataaggccggtctatcggctctcccaacaaataggctcatcctagaaacgttggcgggcatttaccggaagcttgcgaaccgcattacagcaacgaaacagatgggagctgatccaatttgaaatgtccttcatgccagcacaacggttcccgcgtacttgattcacggcctgcggacgaagggaaatcaatccgcagaaggcgggaatgcgaagcctgccattaccgcttcactacatttgagaagtttgaagagatgcctctgatcgtcgtgaaaaaagaaggcgtccgggaagaattcagccgtgaaaaaatgctgcgcgggttaattaaagcttgtgaaaaaaggcccgttcctttaaaaacattggaagacatgtgctttgacattgaaaaagagctgagaaaccaaggtgtatctgaagtcaaaagcgaacttgtcggagaaatggtaatggaccgtctggcgaaaatcgatgaggtgtcttatgtccgctttgcctccgtctaccggcagtttaaggatataaacgtgtttatcgatgaattgaaagatttaataaagaaagaacgctgagagagctaagagattgtgtctggctcttttctcatgagcaaaattggcatttgatagatcgcagaaacggtgtaaaatgagagtagaaacatatcggaaggtttgagaatcatggctgactattggaatgacgtattgcctgtagatccttatacggtcaaaagccgttcgcttcttcaggatgtcgacagacaggttttgacacatctgtaccagccgctgatcggttcttttgcattctccctttatatgaccttatggggggagcttgagcagaaccgcttgtggggagcggaatccacgcacaggcagctgatgggcatgatgcagtcaaatttaaaaaagattcatcatgaacagggaaagcttgaaggaatcgggctgctgaaagtgtatatccgggagtccgagcagaaagagcggatgtttatttatgagctgctgcccccgctcagaccgaatgatttttttgaagacggcatgctgaatgtctttctttataacagagtcggtaaaacgaaataccagcagctgagacaattttacacgcacccttccgtcggcgcgggcgcaagggaaattacccgtccgtttaatcacgcttttgcctcttttcagccgagtgaatggaaaatgacgcctgatatggaagaggcgatgaagctccccgaggactatgagacggcgtctgtcggacaagcgccttcctatacggtgacggaggaagtatttgattttgagcttttcatggcgggactgtcagaaacgatgataccgcgtaaatcaatcacgcaggacgtgcgggagagcattaaaaagctttcatatttatacggaatagatcctatctccatgcagcacgtcgtcatgaccgcaattaatgaacaggatacgataacggccgaagcgctgaggaaagcggccagcgactggtaccaaattgaaagaagcggtaagcttccggaactgattgataaaacacagcctgtcaccttgagagaaaaccggacggaaaaggacgattcattgaacggcgaactcatcgcacagcttgagaccatatcaccgagaaagcttcttcaggacattgcggacgggaccgagccgtcaaaagccgacttgcagattatcgccgatattatgttcgaacaaaagcttgagcccggcgtcaccaatgtgctgatttattatgtcatgctgaaaacggatatgaagctgtctaaaaactatatccaaaaaatcgccgcccactgggccagaaaaaaagtcaaaacggtacgggaagcaatgaaactcgcaatagaagagcacaggcaatatcttgattgggcggacggcaaaacaaacggcgcggcgcgcggcaaaaaaaccgtccgggaagaaaagcgccctgattggatgaaagaagaagaaaccgggaagaaacaagaacagccggctctttccgcgcaggatcttgaagaacagaagaaaaaaatgatggaagaaatgaaaaaactgaaaaaatactctgcctattgagacagagaagcggggtgatattgaatggaaccgatcagccgatccttagaaggcgtgacgaaaagacctgactttcaaaaacgcctggaacgaatgcagcagcaagtcatggccgacgaagacgtccaggcttttttgaaggaacagaaagatgtaatcaatcaaagcatgattgacagagggttaaataaactgtacgaattcgttcagcaaagcaaacagtgcgccttctgctcgaaagacagccggacgaacagcctgcttgaaggctatcatccgaagcttgtgatcaacgggcgttccatcgatattgaatattacgaatgtccggaaaagagaaagctcgaccgtcagaaaaggcaaaagtccctgatgaagagcatgtatatccagcaggatcttctcggcgcgacgtttcagcagatcgacattaccgatccgagcagagtcggcattttccagcatgtgacggattttctgaagagctataatgaaacgggaaaaggcaaagggctgtatctgtacggaaaattcggaatcggaaagacatttattttagccgccattgctaacgaactggcggaaaaagagtattcatcaatgattgtatatgttcccgaatttgtcagagagctgaaaaactcgctccaggatcagtcgttggaggcgaaactgaatatggtgaaaacgacgcccgtactgatgcttgatgacatcggagcggaatcaatgacaagctgggtcagagatgaagtcatcggcaccgtgcttcagcacagaatgagccagcagcttcccactttcttctcgtctaatttttcaccagacgagctgaagcatcattttacgtattcacagcggggagaaaaggaagaagtaaaagcggcaagactgatggagcggattttatatttggcttcgcccgtccgtcttgacggggaaaaccgccgccgttcatgatgccggcgtccaatgggaaggatttgagggaatgaggaataagaaggctgtcacttgggctgcggctgcggcgggagcgggccttttgctgtgggcaaaccgcaaatatctgaatctgtcgcctaaggagatccggctgtgggtgttatcgttcggtgtttttgcgccgcttgtgtttatcggaatttccatcgtcaggccttttgtgctgtttcccgtatcaatcgtttccgtcgccggaggattggcgttcggcccgcttttcggcaccgtgtatacgctggcgggctcaatgggcgccgccgccgcgtctttttttgcggcggggctgtttgcctttaatgagaaaagccgtcatggaaaaatggaagccattcaaaagcagatgaaaaccaatggcttcttttatatttttatcctgcgtattctgcctgttaactttgatgtgatcagctatgccgcgggcctatcgaaagtcaggccgatgacgtattttttggcgaccgcagcgggcatcattccggggacgatcgtcctgaatgtgctcggcgcgagctttatgtccggcaatgtgctgaccgtactcggcgtgatctgtctttacatcgtatttttatcgcttcccgttatatttaaaaagaaggtgcgccatttgttcggcggtgaaagctaacctttacgtctattttaaaaacatcccccatatacttgtaacagatgccgtaaggggggacaaatatgcttgaagtgatctttgaagatgaccacgataccgccgcttttttacatctcattcagcaatcggacgaccggagacattttattgtccgtgaaggcataaaaaaagtcggaatcgcaaggtctgaaacggctttttgcgttcagcgctttattgagccgatacttgtcaggttttttttggaatgcaaagaagacgagcatatgctttcgcttattgaggacgcatactgcttcaccgatcaggatgaacagcagcaaatccttcagcttgcacacagcattatggaaggagagcttgatgatcatccgttcgagccgaagaaagagccgcgcacacagtttatttcagatgcgctccggacgatttcacttgatgcgggtgttttttccgtgcgttcgtttcagacgttccggctcggcaggtattatgagcggctcagagaatacgcggaggctgcgatagatgaataccggatggaacaggaatatcaaaactttatccagtctctgagagattatgtgacatccaatccgccgcggatgaagaaagtccgcatcgtacatgaccgggcttttacgctgtgggagctgcgctatttgtcagaacgggaacagaaaaaatacatagacagacggtttgtgcgggagcacccgatgtatatagattcccatctccttgcgccgctgatctccattgcgcctgagacggtagaactgtatacggacaaaccggagcatatgatgtccagaacgattcaaaacgtgtttcaggagagggtgcgcctttttccgctgggcgcatttgcagccgagaagacggaaggatagccgcacggacggccttgtgtaagcggcaaggctgtctttgcgaaatcagacggaaaaccgagttgcatttttctcacagacattttataatacataaaagattaatgattgctacacgtattgataaggacatgaagcattgataccggctttataagagaggagagcccaggctgaaagctttccagctatggatcattgtctttaccgcctttgaacttcagctgtgaacgccggaagaagcgccagtaatagctgacgggaactcccgttacagagtttagagccgcaggtgccgaaacaatcggccgcgcggaaaaaagggtggaaccacgattccgtttatttaacctcgtccctttcatagggggcggggtttttgatttgcataaaaaaaggagtgacgaagatgtcagatatgatcaacatcacatttccggacggagcggtaaaggaatttccgaaaggaacaacaacagaagatatcgcggcatccatcagtccgggattaaagaaaaagtctttagccggaaaactgaacggacaggaaattgatttaagaacgccgattcaagaggatggtgccgtagaaatcattacagaaggcacagaagaaggcttgaacatcatgcggcacagcacggcgcatttattggcccaggcgattaaacgcatttataaagatgtgaaattcggagtcggccccgtcattgaaaacgggttctattatgacgttgaaatggagcaggcgctgacgccggatgaccttccgaagattgaaaaagaaatgaaacgcatcgtcggtgaaaatctgccgattatccgaaaagaagtgagccgtgatgaagcaaaagccatgtttgcggaaatcggcgataatctgaagcttgaactgctggatgccatccctgaagacgaaacggtctccatttatgagcagggcgaattttttgacctgtgccgcggcgtgcacgtgccgtctacaggcaaaattaaagaatttaagctactgagccttgcgggcgcatactggcgcggcgacagcaaaaaccaaatgcttcagcgcatttacggcacggccttctttaaaaaggatgacctgaaagagcatttgcggatgcttgaagaagcgaaagaacgtgaccaccgaaaactgggcaaagaattaaaattgttcgccaactctcaaaaagtcggacaaggcctgccgctctggctgccgaaaggcgcaaccatccgccgcgtgatcgagcgctacattgtggataaagagctgagcctcggttatgagcacgtctatacgcctgttctcggaagcaaagacctgtacgaaacatcgggccactgggaacattatcaggaaggcatgttcccgccgatggaaatggacaatgaaacactcgtgctccgtccgatgaactgtcctcaccatatgatgatttacaaacaggacattcacagctaccgcgagcttccgatccgcatcgcagagctgggaacgatgcatcgttatgaaatgtccggggcgctttcaggtcttcagcgcgtacgcggcatgacgttaaatgacgcgcacattttcgtccgccctgaccagattaaagaagaattcatccgcacggtccgtttgattcaagacgtatacgaagacttcggcctgagtgattacacattccgcctgtcttaccgcgatcctgaagatacggaaaaatattttgatgatgatgagatgtggaacaaagcgcaatccatgctgaaggcggcaatggacgaaatcggccatgactactatgaagcggaaggcgaagcggcgttttacggccctaagcttgacgtacaggtgaaaacagcgatcggcaaagaagagacattgtcaactgtacagcttgacttccttcttccggaacgctttgatctcacttacgtcggagaagacggcaaacagcaccgccctgtcgttattcaccgcggtgtcgtgtcaacgatggagcgtttcgttgctttcttaatcgaagagcacaaaggcgcccttccgacatggcttgcgccggtgcagttccaagtcattcctgtatcaccgtccgtgcatcttgactatgcgaaaaaagtgcaggagcgcctgcagcgtgaaggcctgcgtgtcgagcttgacagccgggacgagaaaatcggctataaaatccgtgaagcgcaaatgcaaaaaatcccgtacatgcttgtggtcggtgaccaagaagcggaaaacggcgcggtaaacgtccggaaatacggcgagcagaaatcagaaaccgtctcattggacgattttgtgaaaaaggctgtagccgaagcgaaaaaataaccggaaatacaaaaaccccgttcattcagaatggggtttttttgcgtataaaattatctttctttttgtttctctataatcgcaaacagctcgtgaagatcgctgatcacgtaatcaggcgcaatgtccgtatcatttttcttttgcgtccggtttacccagactgtcgtaatgcctgcccgtttcgctcccaatatatcagtattgaggttatctccgaccataatggcgtcttcttttttcaggttcaggaggccgaggcaatgttcgaatatggaggcgtcgggtttcccttttccgaaagcgcctgagatgacgatttcattaaaataaggcgcaagctcaggaacgccggcgagtttttctttctgcaggctgggatcgccgtttgtcagcagaagcaattcataaacacctttcagcttatcaagcaccgcaaacgtttcatcatacacgtacggacgctgtctgcgttccgccgcgaaaaactccgccaaatattcgccgtaagccgcatcgtctataccgacgctttttaagccgttcgtccaggcgtttcgtctgtattccggcgcaatccgattcagctgtttaaatccttcgctgaccggctcggaaaaattcgcccacaatccttcaaacggattaatgccgatcatgaccgtataaggataggtttcgtatgacatatacaattcccgtgccgctttccgaaccgcatcttcaaatgtatgcgggtcaaggccatattttttttccgcttgtaaacatgtttccctgaatgttgttctgacgcttttttcatcccataacagtgtatcgtccaaatcaaaaaatacggctttcatgatcttctcctctttgttatattctgaaactctctgccgcaaggctcccgtttattctacaatagatatatagactgtgaaagatttgttttcagatgatttgaaaaaaacaggcaggtttgtgtcagattctgtctcaggctctaaaacgtgataaaattaaatttgaaagaacaggtgaaaagtatgctgcatttgatcatcatgatgctggaaagagtcggaattatcgtcatattgggatttgttctggctcataccagattgttcagacaggcgctccagcagcctgagagctataaaggcaaagcggtgctgatttcaattttctcgctgttcagtatcatcagcaactatacgggaatagaaattcagcggaatacaatcatgaataatgactgggtgtttcaaattaatccgtccggttcaattgccaatacaagaattatgggcgttgaaatcggcggactcttaggcggcccgtatgtggggatcggcgtcggcatactggccggcctgcatcgtttatcactcggcggcgcgaccgcagtcagctgtgccgtctcatccgttttagcgggcattttgtccggctggatcggacggtatttcagaaaacgctatgcgatgccgacaccgcgggtggccgcgcttgtcggactcgggatggaatcgctgcaaatgctgctcatcctcttgatggccaagccgttttctgatgcttggacgcttgtgagcatcatcggcatcccgatgatattggtaaacgggtcagggacttttatttttctttcgatcattcagtcgattatccggaaggaagaacgggcgagagcccttgaaacccacagggtgctgatgattgcagaccagacgcttccgtttttccgccaggggctgaatgaaagctcatgcaaaagcgtcgccgccatcattcacaggcaaacaggaacggacgcggtatcgcttacggataacgaaaagattttggcgcacgtcggcgcgggtgccgaccatcatattccgtctgaaagcctgatcaccggattgtcaaaacgtgtcattaaaacgggtcatattatgaaagcgacatcgaaggaagaaattgaatgcacgcacgatccctgtccgctgcatgcggcgatcgtattgccgctgacgtcaaacggcaaaacgatcgggacgttgaaaatgtactttaaaagcccgtcaggtttaagccgggttgaagaagagcttgcagaaggactcgccatgctgttttccacccagcttgaactcggcgaggcggaactgcagagcaaattgctgaaagacgcagaaataaaggcgcttcaggcacaggtcaatccgcattttctgtttaatgcgatcaatacgatttctgctctttgccgtacggatgtggaaaaaacccgaaagcttctgctgcagctgagcgtctatttccgttccaatctgcagggggcaaggcagctgctcatcccgctttctaaagaactgaaccatctgcaggcgtatttatcattggagcaggcccgttttcccgggaaatataaaatcagtcttgaaatcgaacgcggtttggaggacatcgaaattcctccttttgtgctgcagattctcgtcgaaaatgcgctccgccatgcattttcaagaaagcaggacagctgtgccgtcaatgtcagcgtggtatccgccggtcagtcggttttaatgcgggttggagataacgggcggggaattgatccggaattgctgtccgtgctcggaaaccgtccgctgccgtctaaagaagggacgggaaccgcgctttacaatttaaatcaacggctgatcgggctgttcggccccaaagcagccctgcgattggaaagtgaggccggcaaaggtacggacgtatcatttgagctgcctttgaaactgatgactaaaggagaagaacatgctgaaggtgttaatcgttgatgatgaaatgctggcaagagatgaattagcttatttgctgaaacggacgaatgaagtaagtgacataaacgaagctgaaaatattgaatccgcttttgacagtatgatggatcaaaaaccggatctgctgtttttggacgttgatttgtcaggagaaaacggatttgacattgccaaacggctgaaaaacatgaaaaatccgccggccgtcgtttttgcgacggcgtatgaccaatttgctttaaaagcctttgaagtcgacgcgctcgattatttaacgaagccttttgatgaagaaagagtgcgccagacgatcagaaagtttaaaagagtgaagcgggacagggcaggagccgtctcagagcagccgtccgcagccggagcgcataaactggctgtatcagccggtgaatctattgtcattttagatacgaaggacattattttcgccggcatggaggacggacacgtttccgttaaaacgtttgccgcgtcttattccgttcatgaaactttggcggtcattgagaaaaaactgcctgatacgggtttcttgagagtgcaccgcgcgttcatcgtgaatacggagcatattacggaaattcatccgtggtttaattcgacgtacaatcttatcttaaaagacggctctaaaattcccgtcagccgtacatacgccaaggacttaaaaaagctgcttcatattatatgaggcggcttttgcatttcagcagccgtttcttgcatttcagaatgaatattcagccgtttgttatgaaagcgctttaaaaggcgatttctcttttataatgaacctaacaaagagaaagaggtgaagaaaatgagtgcgaaaaaagtgtacggatttctgacacaagcatttatttttgccgtaattatgctcatatctaatgggattgcagcgattgtccccattcctatacccgcttccgtagtaggtttggtgttattatttgtcctcttatgcctgaaagtgattaagcttgaacaagtagaaacgctgggaacatcattaacgtcactcatcggatttttatttgtcccgtcgggcatctccgtgatgaattcacttggcgtcatgcagcagtacggcgtgcagatcgcactcgtcatcttactcgctaccatcattctgttaggggcgacgggccttttttctcagctgatcttgtctgtcagccaaaaacgtcagaaggcagctcctgaaaaacaaacggtgcgccgttccaatcaggaaaaagaacttgtgcagcattaggagggaaatcggatgagtccatatttcggtattgtcgtttcacttgcggcctttggcatcggcacgtatttatttaaaaaaacgagaggctttttcctcttcaccccgctgtttgtcgcgatggtgcttggaatcctttttctgaagctcggcggtttttcatatgaagattataaaagcgggggagacattattaaattcttcctggagcccgcgacgatcgcttttgcgatccctttatacaaacagcgtgacaaactgaaaaaatactggtggcagatcatgtcttctatcattgtcggctctatctgctcagtcacgattgtctatttgatcgcaaaaggcattcatcttgacgcggccgttatgaaaagcatgcttccgcaggcggcgacaacggcaattgcccttccgctgtcaaaaggaatcggcggcatcaccgacatcaccgctttcgccgttattttcaacgccgttatcgtctatgctctgggcgctctattcttaaaattgtttaaagtgaaacacccgatctctaaaggactggctctcggcacatccggacacgcactcggtgttgcggtcggtattgagatgggagaagtagaagcggcaatggcaagtatcgcggttgtcgtcgtaggagtggtgacggtgctggtcattccggtattcgttcagctcatcggaggataaacccgggtcatagacccgggtttttttattgtgttggcacgtccgcgtgcggcaaagaacgaaatttcacatttttccttgcgctcgccccggcatcgtgttaaaatgaaaaagttgatccggagaagtcattcttgactaatgatccggtattgtgtagaatagttattgaattgaatataaatcacaagcagaggcacccgcttctcacctgattgacacattcatgtagttggcaggttgaccgtacatttttatttatgcagatgttcgtagtgtgggtgtgttgtcatgcccgcactttttgtttgcctgcagaatgcagtcaacaagcgttgtgaatcaattcgaagaaactatggaggtggctcattattagcaaagatcaattggttaatgagggtatccgtgcacgtgaagttcgtctgatcggacaaaatggcgatcagctcggcatcaagtcccgtcaggaagcacttgaaatcgccggccgcgcaaatcttgaccttgtgttagttgcagcaaatgcaaaaccgcctgtctgccgcatcatggactacggtaagttcagattcgagcagcagaaaaaggacaaagaagcacgcaaaaatcaaaaaatcattaacttaaaagaagttagattaagtccgacgatcgatgagcatgactttaacacgaaattgcgcaatgcgattaaattccttgaaaaaggcgataaagtgaaagcttctatccgctttaaagggcgcgcaatcactcataaagaaatcggccagcgcgtattggaccgtttctctgaagcatgtgcggaagttgcgacagtcgaaacaaaaccaaaaatggatggccgcagcatgttcttaatgctcgcgccgaaaaacgaaaagcaataaggaggaaatcccatgccaaaaatgaaaactcaccgcggatctgctaaacgttttaaaaagacaggttctgggaagttaaaacgttctcatgcatacacaagtcacttattcgccaacaaatcccaaaagcaaaagcgtaagcttcgcaagggtgctattgtgagcgcaggagacttcaaacgcatcaaacaacagcttgccaacatcaagtaatcggacaaggaacaattaggagggaaatataatgccaagagtaaaaggcggaactgtgtcgcgtcagcgtcgtaaaaaggttcttaaattagcaaaaggttatttcggttcaaaacatagattatacaaagtagcaaaccagcaggtcatgaaatcaggaaactatgcattccgtgaccgccgtcagaaaaaacgtgatttccgtaagctttggatcactcgtatcaacgctgctgcacgtatgaacggtctttcttacagccgtttaatgcacggtcttaagctttcaggcatcgaagtaaaccgcaaaatgcttgctgatcttgctgtaaacgaccttactgctttcaatcagcttgctgatgctgctaaagctcagttagacaagtaagttgaaaaagccgctctctttccgggagcggtttttttacgtaaagggtgacaatcaatggctctcttcatttacgccgtattgataaacggatacggcttttggatcatgggcgctgataaaagaagagcaaaggcgcacaggtggagaatatcagagaaacgaatatggctcacagccgccatgttcggctcactcggcgtatggatcggcatgcgcaccttcaggcataagacgaaacacaaatcctttttatacggggtgccgctgctttttctcactgaagccgcccttgtgctgatgtatttggtgtataaagaataaaaagcaggagagcttatcgctcgcctgcttttttcgcttttttgatgggctggtcccaatcaatcttgcaattcggataccgctccaatacctttttttcgacttcttcaaaatcacctgcagaaaagcggttcagcttttccggattttcggtccatacaaatatcgtatgaataaacagcggatgatctttggaagggatatgcttttctccttcaaagagcactcctttataagtaagctggagattttttcgcgtgtttttctgttcgtcaataaaataaaaattctcttttgattgcgccagtctgagccttcttttcgggtttgcgtagaatttgacgcccatgtaaataaaataaataagaagtgcaagcaagacaatcctcaatactgtaatggccatatgtgtgaaggcacctcctcacctttgtcatgatctgatgtaatacgaaaaacaaaacaaaaggtttcattttttaagaagaaatagataaaaacatttacccgtttttcaggcgaattaatcgtatgcttcagcattggttttgtataataagaagggtagtgaaaaaaaggaggtttattgatgacaaaattagatgaaaagctcaccatgctgaaagcgttaacggatgcaaaagggataccgggaaatgagagagaagtaagacaagtgatgaaatcatacatagaaccatttgctgatgatgtcacaacagaccggctgggaagcttaatcgccaaaaaaacgggcaaagaaaacggtccgaaaatcatgatctcagggcatttagatgaagtcggttttatggtgacgcaaatcactgataaaggctttctccgctttcaaaccgtcggcggctggtggtctcaggtcatgctggcccagcgcgtcaccgtcgtgacaaaaaaaggggacatcacggggatcatcggttcgaaaccgcctcacattctgcctcctgacgccagaaaaaaagccgccgatattaaagagatgttcatcgatatcggggcgtccagccgtgaagaagcaatggaatggggcgttcttccgggtgaccagattgtgccgtattttgaatttacagtgatgaacaatgaaaaacatttattggcgaaagcatgggacaaccgtatcggctgtgcgattgccatcgatgtattaaaaaaactgaaaaacagcgatcatccgaatgaagtatacggggtcggaacggttcaggaagaagtcgggctgcgcggggcgaaaacagcggcacatacgatccagcctgatatcgcgttcggtgtggatgtcggaattgccggagatacaccgggaatttccgaaaaagaggcgcaaagcaaaatcggcgaagggccgcaaattattctgtatgacgcgtcaatggtatctcacaaagggctgcgcgaccttgtcgtgaacacggcggaagaagcgggaattccgtatcaattcgattccattgccggagggggcacggattcaggttccattcatttaaccgcaaacggagtgccggcgctgtccattacgatcgcgacgcgctacattcacactcatgccgctattttgcatcgggatgattatgagaatacggtaaaattgatcacagaagtgattaaaaaattagaccgggaaacagttgaccgtattacttatcaataaagatacggaagaatctgcttttttaagcagattcttttttttgtctgtacaaatatgaaccctgcgtctacaataagagaagacatagcaaaaatctgacaacatgtttttgaaagcgctttaaaaaagggagggtttacaaatgaaaaacagattcagacgcatgatccgcttttcatgcgcagccgttacagccggtctgctgctgatgtcttcatctccggcatctgccgcgttttggggggcatcaaatgaattgctacacgatccgacaatggcgaaggaaggaaacacgtggtacgctttcggaaccggtttggaaggggagagggggcttcgcgtcttaaaggcgggcagcggcggcgtatggaccgttcagaaatcaatctttacttccccgctgtcatggtggggcaattatgtgccgaattacgggctgaatcaatgggcccccgatgttcaatattttaacggaaagtattggctgtattatgccgtttcttcattcggcaaaaatacctccgcgatcggtcttgcatcatctacaagcctcagttcgggaaactggaaggacgaagggctcgtcatccgttcaacaagcgccaataactacaatgcaattgatccggagctgacaattgataaagacggaaacccttggcttgccttcggttctttttggagcggcattaagctgacaaagcttgataaaaatacaatgaaaccgacgggatcactttattccatcgctgccagaccgaataacggcggagctttggaagcgccggccatcacctaccagaacggctactattacttaatggtgtcgtttgataaatgctgttcaggcgtgaatagtacgtacaaaatcgcttatggaagatccaaaagcatcaccggcccatatctcgataaaagcgggaaaagcatgtcagaaggcggagggacgattcttgactccggcaatgaccgctggaaaggcccgggcggtcaagacattgtgaacgggaatattttagtgcgtcatgcgtatgatgccgaaaacagcggaattccgaagatgctcatcaatgatatcgattggagttcaggctggccttcctattaattgatcagccgggcatgtgtgtccggcttttttacttgcaataaaagattgacagtttgattcctccttaactataataaaattgttcgtacaaataaaaggatagaagttttgttatttatattcgtacgtatatttttaagaatgcaagcgctttattttgataggaaggggaaatgaatgtgcttcagaacaaagaatatgaattttggtttgtaacgggaagccagcacttatacggagaggaaacgctgcagcttgtcgataaacacgcaaagggaatatgtgacggcctcagcggggtgtcatcaagatacaagatcaggcataaaccggttgtcacgtcatctgaaacgatcagagaggttttgcgggaagcgcagtatcaagaaaactgtgccggggtcgtgacgtggatgcatacattttcccctgcgaaaatgtggattgaaggtctttccgcttttcaaaagccgatgcttcatctgcatacccaatatcaccgagacatcccgtgggaaacgattgatatggactttatgaacagcaaccaatccgctcacggagaccgggaatacgggtatatccagtcaagaatggggcagacgagaaaagtcatcgcaggctattgggatgatgaggaagtcaaacatgacatttcgcaatggatgaacactgctgccgcttggaatgaaagcaggaatattaaagtagcccggttcggcgacaatatgcggaatgtggcggttactgacggagacaaagtcggcgcccacatccaattcggttggcaggttgacgggtacggaatcggcgatcttaccgaggtgatgaacaacgtcaccggcgcagaaattgaggcgctttatgaggaatacgacaaattgtatgtcatcagcggcgaaacaaaacgggatgaagcaaaagttgcttccattaaagaacaggcgaaaattgaactcggattaacggcctttctcgaacggggcggatatacagcgttttcgacctcctttgaagttttgcacggaatgaagcagcttccgggtcttgccgttcagcgtctcatggagaaaggttacggatttgccggcgaaggcgattggaaaacggctgcccttgtgcgaatgatgaaaataatggcggacggagaacaaacctccttcatggaagattatacgtaccattttgaaccggggcgtgcgatgattctcggatcacatatgcttgaagtatgtccgacgatcgcccttgatcagccgaaaatcgaagtccatcctctctcaatcggagggaaggaagatccggcccggttggtctttaacggaatcggcggttcagccatcatcgccagcatcattgatatcggcgggcgattccgtctcattctgaatgaagcggaaggcagggaaattgatcatgatatgccgaatctccctgtggcgcgggtgctgtggaagccggagccatcgctgaaaacagctgcagaagcatggattttggcgggaggcgcccaccatacttgtatgtccttccggcttacggctgaacagatgcttgactgggctgagatggcaggcattgaaagcatctttatttcccgcaataccgaaatacatgagctgaaaaaagagctgaaatggaatgacgtattataccggctgggagggaattgatatggcgtatacgattggtgttgatttcggcacattgtccggccgggcggtgcttgtcaatgtccgcacgggcgaagaaatcgcgtctgcggtaaaagaatatactcatgccgtcatcgaccgcacgctgccgaagacgggtgaaaaactccctcgggactgggcgcttcagcatcctgccgattatatcgaagttctggaaacggcgattccgaacctgcttcaagaggcgggcgctgatccaaaagacgtgatcggcataggaattgattttaccgcctgcacgattttgccgatagacggcgcggggcagccgctttgtatgctgccggaatttgaacgggagcctcatagttatgtgaagctgtggaagcatcatgcggctcaaaaacatgcagaccgtttgaacacgattgccgaagacacaaaagaaacattccttaaaagatacggcggtaaaatttcttctgaatggatgatcccgaaaatcatgcaaatcgcggaagaagcgccgcatatatacaaggcggcagatcggattgtggaagcggcagactggatcgtctatcaattgtgcggttcattgaagcgaagcaactgcacggccggctacaaagcaatctggaatgaggagacggggtatccgccggatcatttttttgaaaagctcaacccgttaatgaaaacgattacaaaagataaattaagcggcaccatttattcagtcggggaaaaggcaggaggtttgaccgaaaaaatggcggagctgaccgggcttctgccggggacggccgttgccgtcgccaatgtcgacgcccacgtgtcagtgcccgcggtcggtattacagagccggggaaaatgctgatgattatgggaacgtctacctgccatgtgctgctcggcgaggaagaacatatcgtccccggtatgtgcggggtcgtcaataacggcatcttgcccggatatgcgggatatgaagcgggacagtcctgtgtcggcgaccactttgaatggttcgtcaaaacgtgcgttccgagagactatgagaaggaagctgaggataaacacatagacattcacgagctgctcagcaaaaaagcagctgaacttgttccgggggaaagcggccttctcgcgcttgactggtggaacggaaaccggtcaaccttggtggacgccgatttgacgggcatgatgctcggcatgacgctgcacacgaagccggaagaaatctacagggcattgattgaagcgacggcgttcggaacgaggatgattatcgaaacgtttcgggaaaacggcgttccggtcgaggagctttacgcagccggaggaatcgccgaaaaaaatccgtttgtcatgcagatttatgcagacgtcacaaatatggacattcaattatccgggtctccgcaggcgccggcactgggctccgcgattttcggagcgctcgccgcgggacgggaaaacgggggatactccaatattgctgaagcatgtgcgcatatggggaaattaaaagacggctcttatgtcccggatcgaaaaagagctgagatttatgacagcttatatgcggaatataaagagctcgttcactacttcggcaaagaaaacaatgtcatgaaacgcctgaaagccattaaaaaccgtgattttgcgaaagggggaagccgccatgcttgaagcgttaaaagaagaagtgctcgctgccaatctgaagcttgaggaacataaccttgtcacgtttacatgggggaatgtcagcggcattgacagagagagcgggagaatcgtcattaaaccgagcggtgtcgattacagtgagctgaccgctgacaaactggtcgtcctgaatgaggacggagacattctcgaaggctcgctgaaaccgtcttctgacacgccgacccatctttatctgtataaagcgtttccgtctatcggtggaatcgttcatacgcactcccgctgggcgacgagctgggcacagtccggaagagacatacccgctctcggaacgactcacgcggattactttgaaagcgctataccctgcacgagggaaatgtatgaagaagaaattgtgaaagattacgaatatcatacaggcaaagtcatagccgaaacttttcaaaacgaaccgtatgaacaaaacccgggtgtcctcgtccacagccacggcccgttctgctggggaacggacgcgctgaatgccctgcataacgccgttgtgctcgaaacggtagcggaaatggcctaccattctcttatgctgaacaaacagctcagtccgatcgacagagtgctgcatgataagcatttttacagaaaacacggggcgaatgcttattatggccaaacttgacgcagccgggtttctgattgatttagacggaaccgtattcagggggcgggagctgattgacggcgcaaaagaagccgttcatacccttcagtcactgggcaaagccgttgtctttttaagcaaccgcggcaatctatcaagagcaatgtgccgaaagaaactgctgggtgccggtatccgcacggatgaacggagcatcgtgctgtcctccagtgtgacggcatcatttttaaagaagcattatcctttgtcaaaggcgtgggtgttaggagaaaaagggctgactgatgaactcgctttagcgggtgtcgccctggcgcaaaacccgcaggcggcagactggcttgtcatctccctgcatgaaaccgtcacctatgaggatctgaatctcgcttttaaggcggcttcctccggcgcgcgcatcatcgccacgaaccgggaccgctcctttccgaatgaaggcggccatgccatggatgtcgcgggaatgatcggggccattgaagcatccgccggagcaaaaacggagcttgtcatcggcaaaccgtcttggctgatggctgaggcggcatgtgaagcgctcggacttccctctgaggaatgcgccattatcggagacagcctcgaatcagatatcgcaatgggcagcctgtacgggatgaaaagcgtattggttctgacggggtcggccaaacttggggagccccgtctatatgaacctgacatcgtccttgattctattaaagacctgacagaattagcgaaggagggaacccttttatgaaacgttctcctgaggacattcaatccgagtttgacaaggaaggggccagccgctcaccgattcaaatagaagatatcgtgatcggggcgaatgcaaaagaagagcttctcagatttctgcaaaaaaaatgctggaatcatccggtcatcgtctgtgaccggaacacgtacgaggcggcggggcgtctgcttgcggacgaattgagggcaggcgggatcaaagcgtcaaaagtcattattccggagcatgaagccggggccgccgcggctgatgagaggacattggtctatacgctgatcaatctcgcggaagagacggatgtcatcattgcggccggtgcaggaacgattcacgacattacgcggtttgccgcctgccagcgcggattgccgtttatctcattccccaccgctccgtcagtcgacggttttacgtcggcgggagcgccgctcatattaaacggaatcaaaacgacgattcaaacgaaagcgccgatcgccttatttgcggatacgaatgtattaaaagaagcgccccgttcaatgacagccgcgggcttcggagacatgctcggaaaaataacatcgctggcagattgggagatttcccgcaggcttgcgggtgagccgtactcagaagccggggcgaagcttgtgaaagacgcgctttggcagtgcattgatcaccgcgctgacattgccatgggaacggaggccggcattcagatgctgatggaagcgctgatcgtttcgggtcttgtcatgcttgcgcttgaccactcccgccccgcctcaggaggagaacatcacatctcgcattggattgagatggaaatgctgaaggcaaaacagcctccgattctccacggtgcgaaggttggctgtgcgtgcgcggtgctgagtgatatttacaaagaactggcttgtcacgaaaagcttgctgaactgccgccgcactttcgcgaggcgattcaatctgcatatgaagggcttcccgacggcaagacaattgccgggtggctcgcatctgcgggaggtcccgcctgtttcgatgagatcggtgtaaaacaggaccttgtcagcgatgcgcttaagcatgcgcacacactgcgagaccgttataccggtttaaccatcataaatgaaaatgcagcgctctttgcacatcatttgcatcaatagccgcacggcctaaagtggaaggggtaatgacatgaaaaaaacgaccgctgtatgtttggtgctgatgatgctcttcttgtttaccgccggctgttcacaagaacggactgccggccggccgggagaaacagagctgacgttttggacatttaacggtctgcacgaacagttttatcaggaaatggtcaaagaatggaatcagaaatatccggatcgcaaaatcaagctgaataccgttgtttatccttatggacaaatgcatgataatttatcggtttcactgatcgcgggtgaggggcttcccgatatagcagacgtggaattaagccggttctcgaactttctgaagggtaaggatatcccgcttgccgatctgacgccgctgattgaaaaagaccgcgataagtttgtggaagcgcgtctggccttatacagcaaaaacggaaaattgtacggccttgatacacatgtggggacgaccgtcatgttttacaacatggatatcatgaaaaaagcgggcgttgatcccgcctccattaaaacatgggaagattaccggcgggcagggaaaaaagtgcgtgaagccgctgggaaaccgatgggaacggttgaaacaaacgactccgccacatttctatccatgatttcgcagcaagggtcaggctactacagcaaaaacggaaaattgattctgaacagcaagacgaatacagacacactgaattatgtaaaggacatggtaaatgataaaacccttctgccggctcccggcggcggccatcacagcgaagaatactacggttttatgaatcagggcggggcagcctcagtgctgatgcccatttggtacatgggacggtttatcgattatatgcctgatttaaaaggaaaaatggcgatttaccctatgccggcctggaaagaaggcggtgacagatcagcgggtttaggcggaacagccaccgtcgtgccgaagcaggctgaacatctgaagctcgcgaaagaatttctcggttttgcgaaaggttcgaaggaagggaatataaagctttggacggtgctcggctttgacccgctccgctgggacgtgtgggattcaaaagaattgaaggagaaaaacaagtacacggatttcttccggaacggtacgtcaattttttcctcgctccttgaaataaaagatgagatcaatccgatttatctgcatgaagacttctctaaagcggctgatctcgttgtcagacaagtgctgttcgatgcgctgaagacgcaggaaaaaacacctaaggaagccttggacgaggcggcagagcaattagagaaataggagaagccgccctatttaacagtgaaagcgggggagcttttatgagacctgtaaagacagagacagcgcaaaccgtttctgcagtccggaagaagccgcgccggtgcaatgtgctgtattcaaaaaaagcggcgccttatctttttacggcgccatttatcatttcgtttctcgttttctttttgtatccgattatcagcgtgtttatcatgagctttcaacggatactgccgggagaaattacatttgtcgggttttccaattataccgctcttcttaatccaaccttttatacggcattatttaacacattggaatataccttctggacgctgatcgtgctgattccggtgccgcttcttttggcggtgattctgaattcgaagctcgtcaggttcagaaatgtgtttaaatcggctctgtttgtaccggctttaacatcgacgatcgtagcggggattattttccgtctgatgttcggagaaatgaatacgtcgcttgcaaacgagctgatgatgaagcttggcgcatcaccccaaaactggctcaacaacaaaggtaccggcatgtttttaatggtactgcttgcgtcatggaggtggatggggattaacattctttactttctggcgggattgcaaaacgtgccgaaagaattgtatgaagcggctgaaattgacggggcgagtacgtggaaaaagttccggcatattacccttccatttttaaagccggtgtccgtttatgtgttaacgatcagtattatcggcggtttcagaatgtttgaggaaagctatgtgctttggcagaataattccccgggcaatatcggcctcacgcttgtcggttatttatatcagcaggggcttgcatacaacgaaatggggtacggggccgcaatcggaattgtccttttgcttgtcatcttactagtcagtcttgtttcactgaaactgtccggttcgtttaaaggggagggataagcggtgcgtaacaatcacatgttttccgtgtacagagtcgcgtttaccttgttttttatcatgctgagcctgttgtatatctttccgatgatctgcctattgctcggttctttaaagccgtcatctgagctgatgcgcatcgggctgaatctgcgccttgatccggatgtgatgagccttgataactacacctatttgttcaacggggggagcatttatttcaaatggttttttaacagcctgcttctcggcgttctcaccacggttctcacgctgtttttttcctctttgatcggctacggactcggtgtctacgaatttaaaggcagaaatattattttcgttcttgtgctgatcattatgatggtgcctcttgaagtgatgatgctcccgttgttcaaattgacggtgggtcttcatttgatcgattcttatacgggagtgattctgccgtttattgtgtcacctgtcgccgtgttctttttccggcaatatgcgctcggacttccgaaggatctgcttgattcagcgagaatggacggctgcaccgaattcggcatttttttcagaattatggcgccgctcatgaaaccggcattcggggcaatgatcattcttcaatctttaaacagctggaataactttttatggccgctgatcgtgcttcggtcgaaagaaatgtttacgcttccaatcggactttcagggctgctgagtccgtacggcaacaactatgacatgctgatttccgggtccgtttttgcgatactgccggtgatcatcatattcttgtttttccaaaaatacttcatttccggactcacagtaggcggagtgaagggatagagagagggaggaaatataatgaaaaaagcggggattacagcagataaagaatatatcatcggtgaagtggacaaacggatgtacggatcatttatagaacatatgggccgggcggtgtatgaaggcatttatgagcccggacacccgaaagccgacaaggacggcttcagaacagacgtgcaggagttaatcaaggaattgcaagtgccgttcatccgctatccgggagggaattttctctcgggctacaattgggaagacggcgtcgggccggtgaaggaccgcccgcggaggctagatttggcatggcaggcgacagaaacgaacgaagtagggacgaatgaatttttaacgtgggcgaaaaaagtgaacgccgaagtgaatatggcggtcaatctcgggacgagagggatcgatgccgcccggaacctcgtcgaatactgcaaccatcctgaagggtcatactggagcgacttacgaaaatcgcacggatatgaaaaaccttacggcatcaaaacatggtgcttaggaaatgagatggacggcccttggcagatcggtcataaaacggcgcatgaatacggacggctcgccgctgaaacggcaaaggtgatgaaatggacggacccgacgatcgaattggtggcttgcggaagctcaaacagcggcatgccgtccttcattgagtgggaggccgaggtgcttgagcatacgtatgagcatgtggattacatctcactgcatacgtattacggcaaccatgaaaatgatcttgagaactatttggcgaagtcgatggatttagaccattttattaaatccgtcacagccgtatgtgattatatgaaagcgaaaaaacgcagcaaaaaaacgattcacctttctttagatgaatggaatgtgtggtatcactcaaatgaagcggataaaaaagtggagccatggattacggcccggccgattctcgaagacatctacaattttgaagatgcgctgttgatcggttcactgctgattacgatgctgcagcatgcggacagactaaagatcgcctgtctcgcccagcttgtcaacgtaattgcgcctattatgactgaaaagggcggagaagcatggagacagccgatcttttacccttacatgcacgcctctgtctacgggagagggacttcaatgaagctgctgatcacctccccgaaatacgactcagcggattttacggatgtgccgtatgttgatgccgcggccgtttaccatgaagaggatgaagcactgaccatttttgccgtcaacaaaagcaaggaactgatggaaacggagatcaaactgagagggtttgaagattaccgcatcattgagcatatcgtgctggagcatcaggatatgaaagcgaccaatcaaaaaaacagaaatgaagtcacgcctcactccaacgggacgtcttccgcaaacgccgaaggaataacggctcattttaagccgctgtcctggaatgtcatccgtttatcaggaaaatagcgttccgaaaagccgggctgcgccgccggcttttttttacgcaaaaatcatctactgttatctgataattgtgataatatttagaaaaagagaaaaggggctgggattaaatgaatgcgattacaatcgtcatagcgtctatatgtattctggcgatcgcctatcggctttacggtacctttatgatggtcaaagtattaaaaatcaatgatcagacaccgactccggcccatgtgcttgaggatgggaaagattatgtgccgacgaataagtgggtgtcattcggccaccacttcgcggcaatcgccgctgccggcccgcttgtcggaccgattctggcagctcagttcggctatctgcccgggcttttatggctgttaatcggggcggtgatcggaggagccgtgcacgatattgtcgtattgtttgcatcaatgcggaaaaacgggaaaacgctttctgaagtcgccaaagaagagcttggcccggtggcgggcttttgcacgggtctttccatgctgtttatcattacgatcacgatggcggggctgtccatggttgtgctgcacgcgcttgagaaaaacccgtggggaacgtttgcggtggggattacgattccgatcgcgatgggggtcggcgtctactataaaaaaacgggcaatctcaaactcgcatcaactgtcgggtttcttttgttaatggccggtgttgtcatcgggccgcggctgcagacaacggctctcggggacatgctgacactggatgcgaaaacgcttgcagtggcgcttcctgtttatgcgtttttcgccgcggcgcttccggtttggcttttgctggctccgcgtgactatttaagcagttttatgaaaatcggggtttttgccgctttgatcgcaggcgtctttttcgtcaatcccgccattaaatttccggccgtaacggagtttattcacggcggagggccggtgatcgcgggtcctgtctggccgtttatttcaataacgattgcctgcggcgccatttcgggctttcatgcatttgtcggttccggcacaacgccgaaaatgctggataaatggagtgatataaagccggttgctttcggagcaatgcttgtggaatgtctcgttggaattatggcgctcattgcagctgccgctcttgagcccgccgactattttgctataaacagcacgcctgaaatattccgcaccctcgggatgaatgtcgtccatctgcctgaattgagtaaagaaatcgggctcagtctggaaggaagaacgggcggcgctgttacgcttgccgtcggaatgacgtatatctttacggagattccgtttttcagtcatttggcttcatacttttttcaattcgtcattatgtttgaagcggtgtttattttaacggcgattgatgcgggaacccgtgtcgcccggtacttgattcaagagtttttcggagaggtctataagccgctgaaaaaaacagactggctgccgggctcgattttctcaagcgcgctcgcctgcctgctgtggggctatcttctgtattcgggcgacatcagctccatttgggcgctgttcggcgtatccaatcagcttatggcgtctgtcggcttaattatcggtgcgaccgtcgtattaaaaatagccgataagcggcgctatatgctgacatgcctgattcctctcgcttatttgtacgtgaccgtcaactatgcgggttattggatggtgcggtatgtgtatttgaaccccgaagcggcgggatacaacgtgctgaatggcgttttatccattatcatgctcattctcgggcttgtgattatcattgcggctgtgaaaaaatgggcgaatgtatggcgtgatccgagtgccagactggaagcttcaatacccggataaatccgcggccgtccgaacattgcagcatcataaaaaagcagagagccgatcggtctctctgctttcatcttatgacaaatccgccgcttccaaaaggtaatccgccaaatgaaccgcgcggacacggcctgttaatccttcgcgtaaaatgccgagctgcatttgcagaaggcatccgggattggctgtcacgatgacggccgcctccgtttttccggcggctttcatcttactgtctaatattttcatagacatctctgactctgttatattataaattcccgccgacccgcagcagctgtcggccttttccatttctctgtactcagcccctttaatgcttttcaaaagcgtgcgcggttcctctgacgtatgcatcacattgcggagatggcaggagtcctgatatgtgacgatatgaggagactgcgcccgcaggtttttttgatggaacttcagatcaaccagtacggatgaaaagtctttgagcttccgggcgaattgttcggcacgttccgcccatccaggttcatctttcagtaaatgcggatattcctgaagaaaggcgccgcatccgccggcgtttgtaatgatataatcagcgtcaagcgcctcaaaagccgcgatattccgcttggccagttcttttcccatctctttttctccgctgtgcccgtgaagcgcgccgcagcacgcctggccgtccgggaccgcgatttcacacccggccgcctgtaaaagcgccgttgtcgcatgatttgtcgctaaaaacatcgtatccattaagcagcccgagaaaaaagcggcccgtttttggacgggacccgcggcaggaagaaaacgcggcctttccttcatgtctttccgtttcggggcgggcgggagcacttgttccattgtgcgcagatgttcaggcaaaacgcgcagcataccggtttttctgacggcggtctgcagtcccgatctttggtatattccgagaagattcacggctgtctgcatgcggttttggtgagggaaaagcccggtgaaggcggctttccgcaagagacgcacgcccggcttatgttttttattttgatgaatgatatccctcgcttcttcaagcagctgtccgtaattgacccctgccggacaaacgggctcgcatgcccggcatccgagacacagcgaaagtgagcgctcgacatcttcatccggctcgatcagtccgtctgtgacggctttcatcagggcgatccggccgcgcggcgaatgggattcttgaaatcccgattcaatataggtcggacaggaaggaaggcagaagccgcagcgcatacagttcagcaattcaccttcatccatgcggtttttgaattctgtttgaatttgttgctgctctttagccgttgtcatttcatcaccaccacgcgtttccttgatgaattggcgaatatttttcccggattcagcagattttggggatcaagcgcttgtttgatcgctttcatggcggtgatgccttctgttttcagcttcatttctaaatacggcgcttttacgatgccgaccccgtgttcacccgttatcgtcccgcccagctcaatcgctctttcaaaaatggcggcaaaagctttttcgacacgttccatctcctctgtatttcggatatcggtggtgcatgtcggatggaggttgccgtctccggcatggccgaatgtgcagatggacaggccgtatgtttctgcaatctcgttaatggctttgaccatgctggcaatttgtgatctcggcacggtcgcatcttccagaatcgttgtcggtttcagccgggcaagggctgataatgcggaccgtctggcctctgtaagcgcgaatgcctcttcctcggtttcagccgtttggacggatacggcggctccgtttttacaaatcgcttcgattttttccatatctcgtctgaccgtttcggtgtcaccgtcctgttcgatcagcagcaccgcttttgcgtcggtcggaagcccgatcttggcgtaatcttcaatgacctgcagtgtcggctgatccagaaattcgagtgtcgccggaatgattttttcagcgatgatggcagaaaccgattccgcagccgcttcaatatgttcatagagtgcaagcagcgtttttttcgtttccggcttcggaaccagctttaaagtcgcttccgtcacaacgccgagcgtcccttctgatccgacgaaaagccgggtcagatcataaccggcgacatcctttgtcagctttcctcctgtgcggatgatatcgcctgaagccaatacggcttcaaggccgaggacataatcccgggtgacgccgtacttcaaaccgcgcagcccgccggaattttcattaatattcccgccgattgtcgatattttcatgctgctcggatcaggcggataaaataaacctttttgttcaaccgcacggatcatatcttgcgtaatcacgcccggctggacggttgccgtcaaattttcttcatcgatttctagaatgcggttcatatgtttgaataaaagcacaagcccgccttcagacggacatgtgccgccgcacaagtttgtgcctgaacccctcggcacgatcggaatgtcatgcctgctgcaaatcgttaatatacgggacacgtcattcgcactgcggggggcgattaccgcatccggcatggcttgcagctgaggagccgcatcataagaatacacaagacggcccgccgccgaatcatcataattctccttcccgaccgtccggatgaacgcttcttttgcctctcgtgaaatcatgttctcccaacctccctgataagaaaagcgttttcatttaattgtaaagaaaaacgattccgcacactatggagaaacatatgaaaaatgttgatatgattacgtgctttttgtatgttgatctaaaaagcgcagcgccaaataaaaagccgctatgtcttcagggcggtccagcttcatatttgtcagtgattccagtttggaaagacggtagcgcaatgtgttgatatgaatatgcatgtcgtcggcggtgcgctttaacgataattgccggtcgaaaaaggcgcgcagcgtatccagaagttcttcccggccgagtacatgctcgagaacccgccgtgaaaattccgacctcgtgcggggtgtgatatcggcaagacacatatccagttttaaatcttcttcaaagacggcctgcttgtcaccgattccggctgaaagtgctttatctgcctgttcgtatgattccgtgaggcgctctcccggaacgatccgtccgatgccggcggtgacaggctgcccaaaaacggcgccgatctttttaatgagctgtgttttggaagccgaatttgcttcatgattaatgagaatgcgttcatttccccagcggacaaacaggtcttcagggcattcgtactgccagagccgcccgagctcctccgctttatattgctcataacggccttgaatgagtatgatccggcggtatgcatgaaggtctgcgccgatgagctttgctttttctaaaaagcccggagaccattctttcagctgcagccaatcaaccataaaggattcaagcattctcgcacgccactgcgcttcttccatatggcgcgtttctttaataaacagctccgtcatttttctgagcaattctccgaaaggcaggatatcgtcagggtctcctgtcaggccgaatactccgatcacttcatggcctgaaaaaacggggaggttcagtcctgcttttacgccctcgagccgtttttcatcttctttcgtaatgatgacattccgtttttcgcgcgcgcagatcagtgcgccttcatgaaaccatccggcgcgcgcctcgttggtgcccgcgatgatcatcccttttgtatcggcaataatcacttcgcggctgtacatatgtttgacttcggcaatcaatttctttgccagttccggctgtaactgcatggcgatccccctcgccattattatacaaaaaaaaccgggtgtcccatcacccggttcatgcttattgcgcaggttttaatccgccttcaagtgttttgagcatttcatttttttctgagtccgacgcatgctgccaaagaacttcgaataagacgccgaggcccggaagcattttttcttcaccgctttggatggcgtcaacgatcgtatgctccagctgatcctggttattgccggttacattggcaataacggcgttgcgtaaattaagatccattacaaccgctcctttttctgaatgtgatacgcatattcttaccgcgcacgcggtttattatgtgctgttcttaagatataataacaacatgcatgaaaaaaggagagcacagacataaagtgaaacgaatcgactctgcaaaaaaccaaaaagtgaaggactggaaaaaacttcacacaaaaaaagagagacttaaaacgaatacatttctgatagaaggagagcatctggcagaagaagcgctcaaatcaaagggaacggtaaaagaaattctcgtaaacgatgagagcgccatcccggccgatctggacatgagcattccgtgctacgtgctgagcgaagacgcgttttcagccgtgacggaaacagaaacgccgcagcggatcgccgcggtctgccatatgccggataggcagcctgatcagctgaagcggctgcttctgattgatgccgtgcaggatccggggaatttaggaacaatgatcagaacggcagatgcggcgggaatcgacgccgttgtccttggtgagggaacagcagacccgtacaatggaaaaacgctgcgttcagcacaaggttctcattttcatattcccattttgaaacgtccgcttgatgagtttaccgttgagctgaaatcacaaggcgtcgcgatctacggcacggcgcttgaaaacggtgcggcttatcaaagtgtgaagcctgaagaatcgttcgcgttaatcgtcgggaacgagggggcgggagtggacgccggccttctgcaaaaaacggatctcaacctgtacgttccgctgtacgggcaggcggaatcgctgaatgtggcggtagcggccgccatcctcgtttatcatctcagaggataggttgcgaaaagccttggatttcactataatagatagcaataatgtaaaaaccgtgacagaggacgtcaatttttgcacacactgccttccagggagaaaatgccgctgactgaaagcatttttatcgcagcacaaaaattgattttcacctctcgagttgtcaccgggaccgcgccaaacgcgcgtaaaggtgaaccggaacgatcgtttccgttatgtcaatgaagctgtcggcagatgaagtctgccttaaaaagggtggtaccgcggccacaactcgtcccttctctcaaggggcgggtttttttgttttctgaaaaaggcatagaacggtttggtttacataaaaggaggatgcatgatggaagagaagcttaaacagctcgaactggaagctgcagaaaaagtagaagcggcgggttcattaaaagaagttaacgacattcgggtgcaatatctcggaaaaaaagggccgattacagaagttctccgcggcatgggcaaactgtccgccgaagagcgcccgaaaatgggagcgctcgccaatgaagtgagagagcgcattgcagcagccattacggcgaaaaatgaacagcttgaacaagaagagatgaataaaaaactcagcagccagacgattgacgtcacattgccgggcagtcaggtaaacatcggcggacgccatccgctgacggtcgttattgaagaaattgaagatttatttatcggcatgggatataccgtcgaagaaggccctgaagtggaaacggattattacaactttgaggcgctgaacctgccgaaggaacatcctgcccgcgacatgcaggacagcttttacattacagaagaaatgctgatgagaacgcagacgtcaccggtgcagacgcgcacgatggaaaagcataaaggaaaaggccctgtcaaaatcatttgtcccggtaaagtgtatcgccgcgacaacgatgacgcgacacattcccatcagttcatgcagatcgagggtctcgtcgtcgaccgcaaaatcagcatgagcgacctgaaaggcacgcttgaattggtcgccaaaaaaatgttcggccaagaccgtgaaatcaggctccgtccgagctttttcccattcacagagccttctgtcgaggtggatgtgacctgctttaagtgcggcggacaaggctgctccgtctgcaaaaaaacaggctggatcgaaattctcggcgccggcatggttcacccgaacgtgctgaagatggctggattcaatcctgaggaataccagggtttcgctttcggaatgggtgttgaacgtatcgcgatgctgaagtacggcattgaagatatccgccatttctataccaatgatgtcagattcatttcgcagtttaaacaggcgtaagaggaggatacacatgtttgtttcttataaatggttagaagattacgttgacttgcagggaatcgatccggccgtgcttgcagaaaaaattacgagagccggtattgaagttgagggtatcgagtataaaggggagggcgtaaaaggcgttgtcatcggacacgtgcttgagcgcgaacagcacccgaatgccgacaaactcaacaaatgccttgttgatatcggtgcggaggaacccgtgcagattatctgcggcgccccgaatgttgagaaaggacagaaggttgccgttgcaacggtcggagccgtgcttcccggcaatttcaaaattaaaaaagccaagctgcgcggcgaagcgtctcacggcatgatctgttcccttcaggagctcggcattgaaagcaagctcgtggcgaaagaatatgcggaaggcattttcgtttttccgaatgatgctgaaacgggagctgacgcaatggcggcccttcagcttgatgatgcgattttagaattgggtttaacgccgaaccgcgccgacgcgatgaacatgctaggcgtggcttatgaagttgcggctatcctcggcgcagaggtaaagcttccggaggcttcatatgaaaaagcggcaggaaaagcggcggatgctgtttccgttaaggttgaagatacgcaggccaatccgcattatgccgcaaaaatcattaaaaacgtcaaaatcggcccgtcaccgctttggatgcagacgaagctgatgaatgcaggcatccgcccgcataacaacgtcgtggacattacaaacttcgtcctccttgagtacggacagccgcttcacgctttcgattacgaccggttcggttcaaaagaggtcgtcgtcagaaaagcggcggaaaacgaaaccatcgtaacgctggatgaacaagagcgaaagctgtcaagcagccatttggtcatcacaaacggaaaaaaagcgcaagccgttgcgggagtcatgggcggagctgagtctgaagtccgtgaagacaccactgcgattttactggaggccgcttatttcgacggacagaccgtccgcaaagcgtcgagagacctcggattgagaagcgaagcgagcgccagatatgaaaaaggcattgatccggcccgcgttttgctggcggctgaacgggcctgcagtctcattcaggcatatgccggcggagaagtgctctcaggcacggttgaagaaaaccatctgaaaattgaagcaaacaatattcacgtgtctgttgaaaaagtgaacgccgtgctcggcatgacaatcgctaaagaagaaatcatcagcatttacaagcgcctcgggtttgcagtcggtgaagctgaagacgttctcgtcgtaacggtgccgtcgcgccggggagatattagaatagaagaagacctgattgaagaagcggcgagattgtacgggtatgacaatattccgtccacgcttccggaaacggccggcacgacaggcggcttgacaccgtatcaggcaaaacgccggaaagtgagacgtttccttgaaggagcgggtctttcacaagcgaccacttattcattaacgaatgataaaaaagcggccgcttttgcgatcgaaaaatcattcaacacgatgcttgctctgccgatgagcgaagaaagaagcattctcagacacagcctcgtgccgaatcttcttgaagccgtttcatacaatctggccagacagactgattccgttgctttatatgaaacgggttctgtatttctgacgaaagaagaaaacacaaaaccgattgaaaaagaacgggttgccggagctgtaaccggattgtggcgcaaaaatttatggcagggtgagaaaaagccggttgatttcttcgtcgccaaaggaatcgttgaaggcctgctgcatcaattgaatgtgtcagaccgggttgaatttgtccagtcagaacgcaaaaacatgcatcccggccggacggcaaacattctattgaacggttcgcttgccggatttatcggccaggtgcatccggcaatggaaaaagagctggatatcaaagaaacgtatgtgttcgagcttgatctgcacgcgcttctgaccgaggaaacagaacctgtcgtgtatacgccgattccgaagtacccgtccgtcacgcgcgatattgcgcttgtggcagataaaaccgttacaagcggacagcttgaagccgtgatcaaagaagccggcggcgcgctgctgaaagaagtcaccgtgtttgatgtgtacgaaggtgagcatatggaagaaggcaaaaaatccgtcgccttctcgctccaatatgttaaccctgaacaaacattgacagaagaagaagtgacaaaagttcatgaaaacgtgctgaaagcgctggaagaaacgtatcaggccgtattaagaggataaagaaaaagcttgcagatcactctgcaagcttttttattatgaccgcttccgttcaacaaggcgtttcgctttttgcgtattggcaaaatgaagtttggtgaacgttctgagcgcaccttctcccttattgatgatcagcttggcggcagcttcatcgacatgcggccccgcgcctttcggaatcgtcatcccagcctcacgggaaagcttatccatttcaattaagaaagaatatcgcgcaatgatagaggctgcggcgacggaaagatgtatgctttccgctttcgtgctgaaaaacgttttttcttttacgatatcccgtccggaaagatgcttaaaataaatgccgggctctgcgaattggtcaatcagaatcgcttccggtttaacgccgttcatttttctcagcagattggaaatcgcctgattatgaaggagcgccttcatttttccttggctcatgcctttttcctgcatctgattgtatttttcgttttttaacacaagcaggctgtaaggaatggttttaattaacagtttggcgatttcaataatctgcggatcttttaaatccttcgaatccttcacaccgagttctttcattaaagaaagctttgatttgtcggcgtaagcgcaggcaaccgttatcggcccgaagtaatcgcctgttccgacttcatcagagccgatcactgacatggaggcaatgcccgccgggggagcgtagagcgggtcggccgcttttttgacggttttctttgctttcggcgcctcagccgttccccagcgggccgcttctgtgccggcgttttttccttgaaagagaaccttgcccgagcggtaggctgtaatggtacagcccggaggcttagcctggaagacggcacccttcggaacggcgggagtaagggagccggcataggattgtttcatttgttccatagcggaagcggatacttttataacagaatgggacacgatataatctccttttttggcacttttcactgtatataccagtgtatcataacagcccgaggctcgtctttccattcaaacgataatcgtggtatgataggaactaggattctcgcggaatggaggagaaacgttgtctgacggcaaaaaaaccaaaacgacagtaaacatttacggccagcacttcaccattatcggggaagaaagcaaagcgcatatgcgccatgtggccggagtggttgatgataaaatgagagaaatcaacgagaaaaatccatatcttgatataaataagctcgctgtattgactgcggtcaatgtcgtgcatgattatatgaaactgcaagaaaaatatgaaatactggagcggcagcttaaagaaaaggaatgaacaccatatgatagatatcatcatcttagttctgctcttaatgggcacattgcttggattaaaaagaggatttatcctccaatttatatatttaacgagtttcatcctctcgattgcgtttgcggcgcttttttacaaaaacctggccccgcatctgagctttatacccgcgcctgatttttccggcgggcaggcggctctgtcttttattaaaggaaacgtagagacggcttattacaacgcgatcgcgtttgtcattttgtttatcatcgcaaagattctgcttcggattatcggagcggcgcttaatattatcgccggcattccggtcattaaacagatcaataaactgctgggcggggtgctcggatttctggaagtctatttatttgcgtttatcctgttatacgtcgcatccgtactgccggtaagcgcgcttcaggatatgctcgcacaatcgacgcttgcaaatatcatcacacatcatacgccgtatctgtcagggctcctgcaagaactgtgggcccagtacggggcataaaaaacttctcttgaccggagaagtttttttcaagctctgcgtcagttgtgccggaggagaaaaatttgtatgatgagaagcaggaaacgactgggggttaacagtatgcataaaaaagatatcatcaggctgcttgaaacgattgcggtctatatggaactgaaaggggacaacccgtttaaaatatcagccttccgaaaagcggcagcggcgcttgagcaggatgaccgcagcctgtcggaaatcgacgacatgatgtctttatccggaatcggaaaaggcacctacggcgtcattcgtgaatatatgcaggaaggtgtgtccggcacgcttctccaattgcagaaagaagttccggaaggcttggttcctcttttgaagcttccgggcctcggcggcaaaaaaatcgccaagctgtatcaggaactgggcgttcatgacgcggaatcgctgaaagaagcatgcgagcagcaaaaagtacaggggctcgccggtttcggcaaaaaaacggaggagaaaatcctccaggctctcggagaagccggaaaacagccggaacggtttccgatcggctatgcgctcagcattgcttcagtaattgaagaacatttggcccggctgacggatattcagaaatattcccgggccggcagtctcagaagagcgcgggaaaccgtaaaagatctcgattacattatcgctacagatcatccggaggctgtcagagaacagcttctttccctcccgaacgtaaaagacgtgatagcgagcggggatacaaaagtatcagtcatcctgacctttgaatatgagacgagtgtggatttccggcttgtgacagaggaacagtttgccaccacactgcatcattttaccggttctaaagatcacaacattaaaatgcgccagctggcgaaagagcgcggtgaacggatcagtgaatacggagtagaaaccatggaaacgggagacgtcaaaacattcccgagcgaagaagcgttttacgcccacttcggtctgccgtttattcctcctgagctcagagaaagcgggcaggaggtcgacacgtaccgggaagaaacggatcttgtggagcataaagcgataaaaggcgatctccacatgcactcagcctggagtgacggcgctttttccatcagagaaatggcagaagcgtgtatggcaaaaggctatcagtacatggcgatcaccgaccattcccaatatttaaaggtagccaacgggttaacggccgaacggctcaaaaaacaggcggaagaaattgacgcgttaaatgctgaatttgaaaattttcatatttttaaaggcgtagaaatggacattctccccgacggttcgcttgattatgatgacagtgttctgtcggaaatggatcttgtcatcgcgtctattcattcaagcttcagccagccggagcatgtcattatgaaacggcttgaacaggcgctgacgaataagcacgtggacattatcgcccacccgacgggacgcctgatcggcagacgggccggctatgaagtcgacatcgacatgctgattgaactcgccgccaaaacaaatacggcgcttgaactgaatgcaaaccccgcgcgccttgatttacggactgagcatctgatcaaagcaaatgaaaaaggcgtgactttggtcattaataccgatgcccataatatcgagatgctcgatgatatgaaaacgggcgtgaccgcagcgcgcaaagggtggacggagacaaaacatgtgttaaacgcccggccgctacacgaggtcaaagcatttctgacgcgcaatgattaagtaaggaggatcacaaaaccgtgcagcaaaaagtgttatcatcacttgaatttcataaagtaaaagaacagattaccgcacatgccgcctcatcgctcggccgggagaagcttctgcagctgaaacctttgacggatctctcagacatccaaaaacagctggatgaagtcgaagaagcatccgcggtcatgcgcttgagaggccatgctccgttcggcggtctgaccgacataagatccgctttacggcgggcggaaatcggcagtgtgctgacgccggcggaattcaccgaattgtccgggctgctgtatgccgttaaccaaatgaagcattttatcagccaaatgacagaagacggcgtcggcattccgctgatacaggcccatgcagaagaactgattacattaggcgatttggaaagggagattaactcctgcattgatgaccatggtgaagtgcttgatcatgcgtctcctgctttaaggggaatccgcacgcagctcaggacgcttgaatcaagagtcagagaccggcttgaatcgatgctgcgttcatcttccgcttctaaaatgctgtctgacaccatcgttacgattcggaatgaccgctttgtcatcccggtcaaacaggaatacagatcaagctacggcggaattgtccacgatacatcttcatccggtgcgacactgtttattgaaccgcaggcgatcgtagatatgaacaactcgcttcagcaggcgaaagtaaaagaaaaacaggaaatcgaacggattctccggatgctgacggagcatacggctgaacacacacaagaaatcgctcaaaatgtggaagtgctgcagacactggatttcattttcgctaaagcgagatacgcaaaagcgatgaaggcgacaaaaccactcatgaacggagacggttttatccgtcttaaaaaagcacgccatccgctgctgccccaagatcaagtcgtggccaacgatattgaactgggcggagattactcaacgatcgttatcacgggaccgaatacgggcggtaaaaccgttacgttaaaaacactcgggctgctgacgataatggcgcaggcaggattgcacataccggctgatgagggatcggaagcagccgtatttgacaatgtgtttgccgatatcggcgatgaacagtcgatcgaacaaagtctgagtacgttctcatcccacatggtcaatatcgtcaatattttaaaagacgtgtctgaaaacagtcttgtgctgtttgatgaactcggtgccggaacagatccgcaggaaggagcggcgcttgccatgagcatccttgacgaagttcaccggacaaacgccagagtgcttgcgacaacccattatccggaactgaaagcatacggatataacagacaaggcgtcatgaatgccagcgttgaatttgacattgaaacgctttcgcctacctataagcttctgatcggagtgccgggccgaagcaacgcatttgaaatctcaagacgccttgggcttccggagcatatcatcggccaggcgaagtcagaaatgaccgccgaacataacgaagtcgatctgatgatcgcatcgcttgaaaaaagcaaaaaaagagcggatgaagagctttctgaaaccgaatcaatcagaaaagaagcagaaaaactgcacaaagaacttcagcagcaaatcattgagctaaacgcccaaaaagataaaatgatggaagaagccgagcagaaagctgcggaaaaactggaagccgccgcaaatgaagccgaacagatcatccgcgagctcaggtccatcaagcaagaacacagatcctttaaggaacacgagctgattgacgccaaaaaacgtctcggagacgcgatgccggcttttgaaaaatcaaagcagccggaaagaaagacagagaaaaaacgcgagctgaagccgggcgacgaagtaaaggtgctcacattcggacaaaaaggggcgctgcttgagaaaaccggcgagaaagaatggaacgtccaaatcggcatcctcaaaatgaaggtgaaggaaaaagatcttgagtttctcaaatcggctcctgaaccgaaaaaagaaaaagcaatcaccgccgtaaaagggaaggattatcacgtatcccttgaacttgatctcaggggagagcgttacgaaaacgccctcagccgcgtcgaaaaatatttagatgacgcggtgcttgccggctatccgagagtgtccatcattcacggaaaaggcacgggcgccctccgaaaaggggtgcaggatcttctgaaaaaccaccgcagcgtgaaaagctcgcggttcggggaagcgggagaaggaggatcaggcgtaacgattgtcgaactaaaataaaaagggagtaaacgtcatgaatgctttttgggaaaatgagcttgttgaaatcgcggcttattacagtgtagccgtcttgtgtctcgtcatttttctgaccgtgtttgaattggtgacatcctataaaaactgggtggaaatccaaaaaggcaatcttgcggtggcaatggcgaccggagggaaaattctcggtatcgcaaatgtctttcagcacagcatcgcccagcataattcgcttttgcaaatgatcggctggggcgtatacggatttattatgcttttaatcagctattttatctttgaatttctgacgccccggtttaaaattgataaagaaattgaaaaagataacagagctgtcggctttatttcatttgtcatctcagtcggcctgtcattcgtggtggccgccgggatttaaggggacggggaaaaatggagaagcttgcgaaagtgctgctgtcggcagcgggaatttttctgttcatcggacttatttatctggtcatgacatcttaatactgaaaaaaggctgccgaactagaatcggcggccttttttattgagaataccagtttatgcaggccgtatcagagcaaatgacggcttcccaactcatggcgcggatgacagacggcatgtcttgatcttccatgagaaagagtgtcgtaaaagaatcatatatgctcataaaagcggcgcgccgtttttcgtcggcaatgatcatgtcagcccgcagcaatccgcatacatccgaagccgccgtttgattgagtgaaaatatgcctttctcttcgaccggctcataataagtgcagcgctttatgccttttgaacggaacacatccaaaagtcccggtatcaaaaatggcgaagtgacatcatcgctcggcaagtacagatcgggatgatgaagccgatttaacagctcggcggattcaggatgtgcatattcatcccgaagtgccatgacagcgctcataagcgcaagcgccgtctctttttcagagcgcaatccgcaaacggtcatgacggatttccaggaaacgggtctgcccatcgcgatgatctcctcatcactcggatatatatgttcataaggccgtttgcgcttttgctcttcccacccatcaggcatccggacaaagggatgaagcaaaaaggcggccgacgtaaacggcttcggcagctggcgcaggataggaactccttcttcaaaatgcagcgtttccagcaagctcaacacctcctgaaactcgaaatttcacatgaaacgctttcccattccaatcacccttctgctataataatagcgtataggaaaacagaagggagaggtattatgcagtctgaaaagccatggctttctcaatatcccgaagagattccgcatgagcttgaatttaccgatcaaaccctgccatccaatctgacaaactccgcagctcaattcccgaaccataccgccatttattttctcggaaaaaaactcacatttcaagacgttctcacagattcgttaaagctagccgcttttttacgcaaaacaggcctgaaaaaaggtgacagagccgccattatgctgcccaattgtccgcagtcggtcatcgctttttacggcgtattgtttgccgggggcattgtcgttcagaccaatcctctctacacggaacacgagcttgagtatcagctgaaagacagtgcgccgcgcgtgatcatcacccttgatatgctgtttccgaaggtgataaaaatgaaaacgttatcaatcgtcgaacgcattattacaacaagtataaaagactttttgccgtttccgaaaaatatgctgtatacgctcacgcaaaaacaacaggtgcatattgattatgacggctgcgaacaaattcacaaattagcggatattttaaaaaacgaaagcgcggaggaggcagagccatttgatattgaccctgcgcatgacatcgccgtgcttcaatacacgggcggaacaaccggctatccgaaaggcgtcatgctcacacaccggaacattcaggccaatacagaaatgtgcgccgcctggatgtacaaaatgaaaaagggagccgaaaaggtgctcggcatcgtgcctttttttcatgtgtacggattgaccgccgtgctcaatttttccattatgcagggatgtgaaatgatccttcttcctaaatttaatcctttggataccctgaaaacaatcgacaggctgaagccgacggtttttcccggggcaccgacgatttacatcgggctgttgcatcacccggagctgaataagtatgatttgtcctccattgaaagctgtccgagcggttcagcggcgctgccggttgaggtcaaacagaaatttgaaaaagtgaccggaggaaagcttgtggaaggctacggattatccgaagcatcaccggttacccattcaaacttcatttggggaaaaaataaacccggcagcatcggctgtccctggcccaataccgacgccggaatctattcagaagaaaaaggcgggcttgcggggccgtatgaacacggcgagctgatcgtaaaaggccctcaggtcatgaaaggatactggaataagcaggaggagacggcgcgtgtcatcagagacggctggctgtttaccggagatatgggatatatggatgaggaaggatttttctacatcgccgacaggaaaaaagacatcatcattgccggcggatacaacatttacccccgggaggtggaggaggcgctttatgagcatgaagccgttcaggaaatcgtcgtagcgggcgtccctgattcctacagaggggaaacggtgaaagcatttatcgttttgaaaaaaggcgccgaggcagatgccgatgagcttgatgcgtttgcaagagagcggcttgcgccgtacaaagtcccgaagctttacgaattcagaaaagagcttccgaaaacggccgtcggaaaaatattaagaaggcgtttagtcgaagaagaagatgcttcccgtgaaaacaaggtgccttaaaagaaaaacttgacaaaatccggattcctttttatcatgaagttatgaatgaatagtcattcatttatcgaaggaaggaacgatgacattgaaccaaaaacggccaaagtatatgcagattattgatgcagcagtagaagtcatagcggaaaacggctatcaccaatcacaggtgtccaaaatcgccaagcaggccggcgttgcggacggcaccatctatttatatttcaaaaacaaagaggatatactcatttctctttttaaagaaaagatgggccagttcattgaacgcatggaagaagaagtgaaagaaaaaacgacggcaaaagaaaaactcgccctcgttattaagcagcatttcacactgctcggcaatgaccgccacctcgcgattgtgacccagcttgagctcagacagtcaaatatcaagctgcgcctgaaaatcaatgatattttaaaaggttatttaaacatgctggacaccattttgaccgaaggaatcaagtcgggggaatggaaagacaatctcgacgtccgcctcgcccggcagatgatattcgggacgatagatgaaacagtgacaacatgggtgatgaacgatcagaaatatgatcttccggatttgtcagacaaggtattggagctgttggtgtcagggattcatcaaaactaaagggggttgacggatgaacagcctttcgatggcggtagaacaatctgttgcggtgattaccattaatcatcagccggccaacgcgctatccggtgcggttttagatgagttgtccggtctgttcgaccgatgtgaaacagatgacagcgtcagaagcatcatcattcgcggtgaggggaaatttttctcggcgggcgccgatataaaggaatttacgtcgcttgaaaatcttgagcaatcttctgccatggcggataaaggccagcagctgatggaaagaattgaagggtttccgaagcccgtgatcgcagcgattcacggcgctgcgctcggaggcggccttgagctagccatggcctgccatatcagaatcgctacattggatgcaaagctaggcctgcccgagctgaatctcggcattattccgggctttgccgggacgcagcggcttccccggtacgtcggtacggcgaaagcgcttgaaatgatcggcacttcagaacctgtgtccggagaagaagcgctcagcctcggtcttgtcacgataggcgccgaacatgaggaagagctgctgaaaaaggcgaaaacgctcgcgggcaagtttgcggaaaaaagcccgcagtcgatggcttatctgcttgagctcctttattcaaataagatctattcttatgacggcggcttaaagcttgaagcaaagcgctttggggaagcatttgcatcagatgacgcaaaagaaggcattcaggcatttctcgaaaaaagaaagcctcaattcggtgggcgaagataaaggggataaaaatatgaatctatttgtactgatgaaacggacgtttgacacagaagagaaaatcgtcattgaagcaggaaagattcaggaggacggggccgaatttatcattaatccgtatgatgaatacgccattgaagaagccattcagctgaaggaagagcacggcggaagcgttaccgccgtaaccgtcggcggagaagatgcggagaaagaactgagaaccgcccttgcgatgggctgtgaccaggcggtgttaatcaatattgaagatgatctgagcgatcctgaccaatactccatttcaactatcttatatcattatttcaaggaccgggaatatgatctgattctcggcggaaatgtcgcgattgacggcggttcaggccaagtggctccaaggcttgccgaactgctgaacattccttgcgtcacaacgatcacaaaactgacaatcagcggcgatgaagctgtggcagagaaagacaatgaaggggataccgaaatcattaaaacctcacttcctttagtcatcacggcacagcaaggcttaaacgagccgcgctatccgtcgcttccgggcattatgaaggcgaagaaaaaaccgctggaagaacttgagctcgatgatctcgacattgatgaagatgatgccgcaccgaagctcaaaacgatcgaacgttttctgccgccgcaaaaagaagcgggcagactgatcgaaggagaagccgctgagcaggcgaaagagcttgtgtcactgctgagaaaagaagccaaagtcgtataaaccgatattaaagaaactgggggatgtcagaatgggaaaaaaagtgatcgtactcggagaaattcgtgacggcgccttacggaacgtcacctttgaagccatagccgcaggcaaaaccatttccggcggaggagatgtcatcggcgtgctgatgggaaaaggcgcagctgatgcagcaccagaactcattcagtacggcgccgacaaagtatttacggccgattcgccggggctttctcagtatacggcggacggatatgccgcggttctcggggatttgatcgaaaatgaaaagcctgatgcggtcattttcggccacacttctatgggaaaagatttgtcacctaagcttgcggcccggtttgaaacggggctgatttcagacagcacggatgtaagcgttaccggagacaacatcgtttttacaagaccgatctattccggcaaagcctttgaacaggtgatttcaactgatccgttcattttggcgacgattcgtccgaataatattcaggcattagaaaaagacgcgagccggacgggtgatatcgaagagcttgcggcgcctccggcagatttgcggacggtcattgaagaagtagtcaaaaaaacggcggacggcgtggatttatcagaagcgaaaattatcgtagcaggcggccgcggtgtaaaaagcaaagatggatttgaaccgttaaaagaacttgccgaggtgctcggagcagcggtgggcgcttcacgcggcgcgtgtgacgcggactattgcgattattctcttcaaatcggccagacgggaaaagtcgtcacgccggatttgtatatcgcctgcggcatttccggagcgattcagcacttggcgggcatgtcaaacagtaaggtcattgttgccattaacaaagacccggaagcggaaatatttaaaatagcggactacggaattgtcggcgatttgttcgaagtggttccgcttctgacgcaggaatttaaaaatgccaatattcattcataatcataaaccctctggcttatttgtcagagggttttaatttgtgttaattggttcgtacaaattaaaggttgataaaataagagattgacatgtacgaaccaatataataagcttttgtaaagcgcttacaaacttatccattcagcatacatcccagatacatagatcggctgtagtgctttcattcttattaagggaaaggaatgatcaagtttgtctcacaatacggcagtcattcaaactgatatcacacggggaaccattaataaaaacatatacggacatttcgcggaacacctgggaagaggcatatatgagggcatctgggtcggaaaagattccgatattccgaataccggcggggtcaggacggatgtcgccgccgccctcaaacagcttcagattcccgtcctcagatggccgggcggctgttttgcagatgaataccattgggcaaacggcgtagggaaacgcaaaaccatgctgaatacccattggggcgggacgattgattccaatgaattcggcacgcacgagtttatgatgctttgtgaactgctcggctgcgaaccgtacatcgccggaaacgtcggcagcggaacgattaaagaaatggctgattggattgaatacatgacgtttgaagcgggcacgccgatgtccgactggagaaaagaaaacgggcgggaaaaaccgtggaagctgacatatttcggaatagggaatgagaactggggctgcggcggaaacatgcatcctgagtattatgccgacctttacagaaactttcaaacctatgtccgcaattacagcggtaatgaaatctataaaattgccggcggcgcgaatgtcgacgattaccgctggactgaaactttaatgaaaaaagccgctgatctcatggacgggctgagcctgcattattacacaataccgggcgacttctggaaggggaaaggatcagcgacggagtttacggaagatgaatggttcatcacgatgaaaaaagcggcgcatatggatgaattgatcacaaggcacagcgccatcatggatcagtacgatcccgaaaaaagagtcgggctgatcattgatgaatggggcacgtggcttgatcctgagccaggcacgaatccgggctttctgtatcagcagaatacgatccgcgacgcccttgtcgcagccacgcattttcacatttttcatcagcacgcagaccgcgtacagatggccaatatcgcgcaaaccgtcaacgtgcttcaggcaatgatcctgacagaagggaaagacatgctgctgacgccgacgtatcatgtgtttgatatgtttaaggtgcatcaggacgcttctcttttggcgacagaaacaaaagcagccgggtacgaatggaatgacggccggctcccgcaagtcagcatttcagcgtccaaacagcaaaacggagacatacatatcagcctttgcaatatcgatcatctgcacaaagctgatgtgaagattgaactgcggggcatgaaaaaggcagggaagccttcgggaacgattctgcacgcggaaaaaatgaatgcccataatacattcagcagtccggaaaacgtcaaacctaagccgttttccgggttttctcaaaagggcggaaaacttgaggcggagcttcctccgatggcggttgtactaatcacgctgcctgcgaatccatcttaagttttgaacgcctgccgcccggttataatacactgtataaataagattattttcggcgggatcgggagaaaataatataagcattaaattagcatgaacgaatgggagatgctatactaaaaatcatcatttgacaattggaggaataacaaatggctatcgtaaaagcaactgatcaatcgttctcagctgaaacaagtgaaggtgtcgtattggctgatttctgggctccttggtgcggaccttgtaaaatgatcgcgcccgttcttgaagagcttgatcaagaaatgggagacaaactgaaaatcgtcaaaatcgacgtggatgaaaaccaagaaactgccggtaaatacggcgtcatgagcatcccgacacttctcgtattgaaagacggagaagtcgttgaaacatctgtcggtttcaaaccgaaagaagctcttgaagagcttgtaaacaaacatctgtaagccgaaagcttccgttacggcagggcgattcctttgaagggaatcgcctttttttgaccttccaaaagctgagaatggagaaaaacaagtgttcgtgatacactgaatggacacgagaaatgaatgtaaggaagggtaacgtatgaataaacaactgaaagaaaaactggccctccttcccgatcagccgggctgttatttaatgaaagaccgtcaaaaaacagtcatctacgtggggaaagcgaaagtcttgaaaaacagggtgcgatcttatttcaccggttctcacgacgcaaaaacccaacggcttgtgtcggagattgaggactttgaatatatcgtgacttcctccaatcttgaagcgctaattttggaaatgaatctgattaaaaaatacgatccgaaatacaatgtcatgctgaaagatgataaaacctatccctttattaaaatcacccatgaacgccatccgcggctgattgtcacccggaatgtcaaaaaagacaaaggacgctatttcggcccgtatccgaatgtgcaggcggcgcgggaaacgaaaaaactgctggaccgcctttacccgctcaggaaatgctcaaagctaccggaccgcgtctgtctctattatcatctcggacaatgcctcgccccatgtgtaaaggatatatctgaggagacaaaccgcgagattgttgaagacatcacccgttttttaaagggagggcataacgaaatcaaaaaagagctcgaagcgaaaatggcagaagcggcggaaaagcttgaatttgaacgggctaaagaattccgcgaccagcttgctcacatcgaatcgacgatggagaagcaaaaaatgaccatgaatgaccttctggaccgcgatgtgtttgcatatgcctacgataaaggctggatgtgcgtccaagtctttttcatacgccaaggaaaactgatcgaacgcgacgtcagcatgtttccgatgtatcaggaagcggatgaagaatttctgaccttcatcggccagttctactctaaaaacaatcactttctgcctaaggaaattctggtgcctgacagcgttgacagggacatgatcaccgagctgttggaaaccgccgtgcatcagccgaaaaaaggcccgaaaaaagagctgcttttgcttgcgcacaaaaatgcgaaaatcgccctgcgggaaaaattctcgttaatcgagcgggatgaggaacggtcaatcggtgcagccgaacggctcggcgaagcgctgaatatttatacgccgcatcggattgaagcgtttgacaactccaatattcaaggcacaaaccccgtatcggccatgattgtctttattgacggaaaaccgaataaaaaggaataccgcaaatataaaattaaaaccgtaacagggccggatgattacggctcaatgagggaagtcatcagaagaaggtacacgagggtgctccgcgaaaatcttccgctgccggatttaatcatcattgacggcggaaaagggcagattaacgcggcgcgcgacgtgctcgagaatgagctcggccttgatgtcccggtagcgggattggcgaaagatgataaacaccgaacatccaaccttttgatcggcgacccgcttgaaccggtgtttctggagcggaacagccaagagttttacctgcttcagcgtattcaggacgaagttcaccgttttgcgatcagctttcacagacagatccggggaaaaagcgtctttcaatccgttctggatgatatccccggaatcggtgaaaaacgcaaaaaaatgctcttaaaacatttcggatctgtcaaaaagatgaaggaagcaagccttgacgatatcaaaaaagcgggtgtgccggccgcggcggcccagctgctgtttgaaaaattaaaaaaatagtattgtgcttttctgaaaaatctgctagaatgtgaactaatttcataagatcgtgttatatggtgaagatagaggtgcgaacttcattagtaagcctttggagaatgatggattctgcgaaaaaggctgaaaggggagcgtcgccgaagtgtatcacatcccatcggtgtgatttgctggccttgcattaaataaatgtaaggctgtcaagaattcattttcttggagggctatctcgttgttcataatcaatcgtaatgatatgaaaaagcaatgagagctattcctctcattgctttttttattgtggacaaaacgctcttttctcctcacccgcacgaaccaaaatgtaaagggtggtctagtatgggtcttatcgtacaaaaattcggaggcacttccgtcggctctgccgaaaaaattcaaaatgccgcaaatcgcgccattgctgaaaagcaaaaaggccatgacgtcgtagtcgtcgtttcggcaatgggaaaatcaaccgacgcgctcgttaacctcgcggctgaaatcacatctgaaccaagcagacgcgagatggatatgcttttgtctacgggagagcaggtcacgatttcgcttttggccatggcgcttcaggaaaaaggatatgacgccgtctcttatacgggctggcaggcgggtgtccgcacggaagccgttcacggcaatgcgagaattacggatattgatatcacggcgattcgttcgcagcttgcagaaggcaggattacagtcgttgccggttttcagggcgtaacggaagacggaggcatcacgacgctcggacggggcggttccgatacgacggcggtcgctcttgccgcagcgctggaagcggataaatgcgacatttatacagatgttccgggcgtatttacgacagatccgcggtatgtccggtcagcgagaaagctggcgggaatttcttatgatgaaatgctggagcttgcaaatctgggagcgggtgttcttcacccgcgggcggttgagttcgcgaaaaactaccaagtgcctttagaagtgcggtcaagtacggaacatgaagcgggaacattaattgaggaggaatcatcaatggagcagaatttaatcgtcagaggaattgcatttgaagaccagatcacgagggtgtccgttacgggcctgacaagcggactgactactctttcaacaatcttcaccgcgctggcaaaacgaaacatcaacgttgacattattattcagacacagtcggacgatggggaagcggatatttctttctcagtgaaaacggaagatgccgcgcaaacggtcgccgtgcttgaagaatataaaaacgcgcttgactatgaaaaaattgaaaccgaaagaaaactggcgaaagtctccattgtcgggtcgggcatggtttcaaatcccggcgtcgccgcggacatgtttgccgtactggcggaaaaaaatgtacaagtcaaaatggtgagcacatctgaaataaaagtatcagcggttgtcagcgaaaatgatatggtgaaagcggtcgaagcgcttcatgatgcgtttgagctttctaaacagccgtctgctgtgtaaacgggcaggcaaaaaggcgggacttggagtcaccgccttttttcaattatacagggtccttcatatcccattttacagtcaggacgactttatccgctctcttttttacctgttcataagattctgcgatctgatcgttcatcaattgaatctgttcggctataaaaccggcttcaagctgaaaacaaggctctttctgatgtttgagtctgctggatacgagcggtccttccagttcaaattccagttcttgtttttttgatcctgcgtttgtcaaagttccccagccggctttttcaaaaaaggcggggatttcttcccacgattgaagaggaaatttgcgggcgaggcgttttcccgcccaatacatcatcgatgaatactccgggccgaggatatccggaagcacgatttcccggattaattcgtagccgtatgcgctgacgtcgagttcagttaaaggttctaaagctgcttcataattattcttcatattatgtattcccctctctccttcgtttattatagcttaaacaggggggaggattacaggatgatcctataaaacacgcgaaaaaatgtgagaaagatatcgcaggaaaataaaattttccctccagataatcaattccgaaaattataatttatgtacacgttttcttgacgcccttttgagggaggagtaaaatgaaattgtcaataaattttaataaagtgcttacaattgaaacgaagtgggggcagagattttagtacatttcgcacttaaatcaaacagggggtaaagtaatgtctgggaacagagagttttattttcgaagattgcattccttgctcggtgttattccggtcggcatctttttgatccagcatttagtcgtcaaccaatttgccgcaaggggagcggatgcgtttaacaaggcggccggctttatggacagtctgccgttcaggtatgcgttagaaatttttattattttcttacctttaatttatcatgcggtttacggtgtgtacatagcatttactgcgaaaaacaacgctggccactacagttatttcagaaactggatgtttgtgcttcagcgtgtcactggtattctcacccttattttcgtcagctggcatgtatggcagacgcggattgccgcgcagatgggcgctgaagtcaacttcgatatgatggcgaatattttgagctcgccgtttatgctcggtttttacattgtaggcgttttatcggtcatttttcacttttcaaacggcttatggtcttttgcggtcacatgggggatcacggtcacgccgcgttctcaaagaatttcgacttacgtgacgctgattatatttttagcgctttcatacgtaggtttaaaagcgatttttgcgtttgtgtaagagaactagattactagagggagaggggctatcatgagtcaatcaagcattatcgtagtcggcgggggtcttgccggcctcatggcgacaattaaagcagcggaatcaggcacggccgttaaattgttttccatcgttccggtcaaacgctctcactcggtctgcgcgcagggcgggataaacggagctgtcaacacaaaaggggaaggagactctccgtttgagcattttgatgacacggtatacggaggcgactttttggcaaaccagcctcctgtaaaagcgatgtgtgaagcggcgccgtccattatccacttattggaccgcatgggggttatgtttaacagaacgccggaagggctcttggacttccgccgtttcggaggtacacagcatcacagaaccgcatacgcgggagcgacgacgggtcagcagcttctttacgcactggacgagcaggtgcgcagatatgaagtggcgggtctcgttacaaaatacgaaggctgggaattcctcggcgccgtgcttgacgatgagcgcacgtgccgcggtatcgtagcccaaaatctgaccaatatgcaaatcgagtcattccgttctgacgccgttatcatggcgacgggaggacccggaatcgtattcggaaaatcaacaaacagcatgatcaatacgggatctgccgcatcaatcgtctatcagcagggcgcttattatgcaaacggcgaatttatccaaattcacccgacagcaatcccgggggacgataaactgcgtctgatgagtgaatcggcgcgcggcgagggcggaagagtctggacgtataaagacggaaaaccttggtacttcctcgaggaaaaatatccggcttacggaaacctcgtgccgcgggatattgcgacacgtgaaatctttgacgtgtgcgtgaatcagaaactcggcatcaacggagaaaacatggtgtatcttgatctgtcgcacaaagatccgaaagagcttgacgttaagctgggcggcattatcgaaatctatgaaaaattcatgggcgatgacccgcgcaagcttccgatgaaaattttccctgccgttcactattcgatgggcggactgtgggttgattatgatcagatgacaagcatccgcggactgttcgcagcgggtgaatgtgattattcaatgcacggaggaaaccgtttaggggcgaactctctgctttccgccatctacggaggaatggtggccggaccgaatgcggtgaaatatgtttccggacttgaaacatcagcggaagacctgccttcttcattatttgattcctatgtgaaaaaagaagaagaaaaatgggccgatattatgaagatggacggcgacgaaaatgcctacgtgcttcaccgtgagctcggagaatggatgacggccaacgtcacggtggtccgccacaacgacaagcttttgaaaacggatgacaaaatccaagagctgatggaacgctttaagaaaatcaatatcaacgatacgacaaaatggagcaaccaaggggcgatgttcacccgccagttctccaatatgcttcagcttgccagagtcatcacgctcggcgcatataaccgaaatgaaagccggggagcgcactataaaccggatttccctgaaagaaatgacgatgagtggctcaaaacgacgatggctaaacatgccggtccgtttgaagctccggaatttgaatatcaggatgtcgatgtatcactgattgcgccccgtaaacgcgactactcgaagaagaaggtggcgaaataatcatgagtgagaaaaagatacggtttatcattacacgtcaggatacgcccgaaagcgcgccatacgatgaagaattcgaaatcaattaccgcccgaacctgaacgtgatttccgccctgatggaaatccgcagaaatcccgtgaatgcaaaaggagagaaaactactccggtcgcatgggacatgaactgtcttgaagaagtatgcggcgcctgctccatggtcatcaacgggagaccgcgccagtcatgtacggcgctgattgataagctggaacagccgatccgtctgaaaccgatgaaaacattcccggttgtccgtgaccttcaggttgaccgcagcagaatgtttgattcactgaaaaaagtgaaagcatgggtgccgattgacggaacttacgatttggggccggggccgagaatgccggaaaaacgccgccagtgggcatatgaattgtctaaatgcatgacatgcggcgtctgcctcgaagcctgcccgaacgtcaacagcaagtcgaaattcatggggcctgccccgatgtcgcaagttcgtctgtttaacgcccatccgacgggcgcgatgaacaaagcagaacgtttagaagcgttaatgacagacggcggcctcggagattgcgggaattcacaaaactgtgttcaatcctgcccgaaaggcattccgcttacgacttcaatcgccgctttgaacagagataccaatttacaagcattccgtaatttcttcggaagcgacagagtataagaaagagaaaaagagcctcttccgcacgggagaggtttttttataaggagctgaaggtgatgaaacaaccgcaatatattgatgtcccgtttgaagaatggagacagtcgttttctttctttactgaagtatcggttcgtttttcagaaacggatatgttcggccatatgaataatgtaacccctttcatctattttgaagaagcgcggatcgcttatttcaaacagcgaggcataacggcgcaaaactcggaaacgatgacggtcgtcgcaagccagcagtgcgactatatgcgtcaggtgatgccgtatgaaaatctgcggatttatgtgaaagcaagcgctgccggaaatgcgtccgtcacccttcattaccttggagaaaatgagtcgggcctgccgtgctttacaggttccgtcgttatggttcaagtgtcgaagaaaagcggcaaagcggtcagctggacggagcgggagaaaggcattctgctcgcctgaacggataactatttctctaagagacgtcacctccgaagcgccctttacatatgatatcttgactatataaacccattcgtttcagattcgctctcaccttagcaaggagggttacaatacttgaaggagaaagattttcaatcaaagccgctgctgaccaaaagagaaagagaagtattcgaattgctcgttcaagacaagacaacaaaggaaattgcaagcgagctatttatcagtgaaaaaactgtacggaatcacatttcaaatgccatgcagaagttaggtgtgaaagggcgttcgcaagctgttgtcgagcttcttagaatgggtgagctagagctctgattcttgccggttttccttcttttcgagaaggagccggttatttgcgttggcgcccgggctgatgggcatgcggtgaaaatcccggtttttcctttttctccgtcagtcttgcattttcttaaaaaaagaaggaaaatagacacggagcgcatagcccagaaagatccttgagtgagggatggacaaatgacatcaaaatctgtagagcatgttgcggatatcgaaaaatcactccgccatatcgctgcgatcattaaacaaaaaggaagagaaatccttaaccaatatgcaattacaccgccgcaattcgtggggcttcaatggctttatgaattgggggatatgacaataggcgaattatcaggcaaaatgtatttggcttgcagcacgacgacggatctgatagaccgcatggaaaaaaataagcttgtcgagcgggtgaaagacccggccgacagacgggtcgtcagaattcatcttctcgctgaaggagagcgcattatccaagaagtgattttgaaaagacaggcttatttgagggatatgtttgcgacattttccgaagaagaaacagccgctttcgaaaaatcattattgaaactgcagcatgaaatgaaaagaaaatgaggcgattttgttggaacagccgataggagtcattgattccggggttggcgggttaaccgttgctaaggaaatcatgagacagctaccgaaggaaaatatcatctatgtgggagatacaaaacgctgcccgtacggcccgcgtcctgaagaagaagttcttcaatacacgtgggaaatgaccgattacctgctggaaaaccaccatatcaaaatgctcgtaatcgcctgcaatacggccacggccattgccttggaggatattcagcgcaaaacggatattccggttgtcggcgtcattcagccgggtgcaagaacggcgataaaggtcacgaaaaaccagcatatcggcgtcatcggcacggtcaataccattaaaagcagagcgtatgagcaggcgctgctcggattaaacgcagaacttcaagttaagaacacggcttgtccgctgctcgtgccgtttgtggaaagcggacggtttcttcaggaatcagcggaggaagcggttgaagcatcgcttgagcctttaaaaggtacatcaattgacaccttgattttaggatgtacgcattatccgattttaaaagatccgattcagaactatatgggagagcatgtgaaaatcatttcctccggagacgagacggcgagagaagtgagcaccatcttgtcttataaaggtttgttaaaccaatcgaaacatgcaccggagcatcaatttcttacaacgggagagcggaacggtttcgcaaaaattgccgaagactggttcggccacgaaatcggccatgtcgagtgcatctcccttcaagagccggtcagaaaataaatcaaaaaaacccgctgtttacggcgggtttttttgcgcttcccggtctatttcccggacagggctcgtatacatcatagtacaaacagccttaggagggaaaagtatgctgaaaaaaggacctgcagtcattgctgcaacatgtcttacttcggcttttgtgttatctggatgcggtttgtttcaatccgataaaacagccggggaaattgacccgcctcaagacatttcatatgtaaaggatgaagcgggaattcaggcaaaaccaaagcagtcagagaaaaacggcacttctaaagccgaccagccggccaatacagtcatgcgagagctgtatctgattgataaaaacggctatgtcgcagcacagacactgcctcttccgaacagtgagggaaccgcaaagcaggcccttgagtatttggttcagggagggcctgtgtcagaaatcctgccgaacggcttcagagcggtgctccctgcggatacgacggtaaatgtcgatattaaaaaagacggcactgccgtcgctgatttttcgaaggaatttaaaaactataaaaaagaagacgaacaaaaaatcctgcaatcgattacatggacgcttacccaattcagctcaatagataaagtcaaaatcagaatcaacgggcacgaactgaaagaaatgcctgtgggcggcactccgattacgggcgacttaagcagaaaagacgggattaatattgaaacggccggagtgaatgatctgacagacacccatccgctgactgtctattatctggcggaaacagagacaagcgaatactacgtgcctgtcacaaagcggattgacaattcggaaacagatgacatcaccgctgccgttgaacagctcgccgacggaccgggcaaagcaagcgggcttttgacggactttaataacgatgttaagcttctcagcaagccgaaagtgaaagacggccaggttacactggactttaacagctccatttacggaagcgccgacgaaaaaacaaaaatggtatcatcgggcgtattggacagcatcgttctcacgttaaccgaacagccgtcgattaaaagtgtttctataaaagtaaacggaaaatcagaactggtgaatgaaaaaggagaatccctttcaaaacctgtttcgaggccgtcacaagtgaatacgggtagtttttaatttgcgatttttgatatactagtaaaaaagaggttagcgttccggctgcctctttctttattcacaatccggaacaaaaggtttatgtacatataatcggaggtaaaatatgagacacgacggaagacagcacgatgagctgcgccctatcacatttgatttggattttatcactcacccggaaggctctgttttaattacagcgggaaatacgaaggtcatctgtaatgcatctgtggaagaccgggtgccgccatttttacgcggcggaggaaaaggctggatcacagcggaatacagcatgcttccccgcgcgacgaatcaaagaacgataagagaatcttcaaaaggaaaggtctccggcagaacgatggaaattcagcggctgatcgggcgcgcgctccgggccgtcgttgatttggagaagcttggcgaacgcacgatctggatcgactgtgacgtcattcaagctgacggcggaacaagaacggcttccattaccggcgccttcttggcaatggccattgcgatcggcaaactcgtaaaaagcggcgttatcaaaacctctcctgtgacagattatctcgcggccatttctgtcgggatggataaagaagaaggccttcttttggatctgaattatgaagaggattcggcggctgaagtcgacatgaatatcatcatgacgggaagcggacgttttgtagagcttcaagggacgggcgaagaagccacattctcccgtgaagatttaaacggactgttaagtcttgccgaaaaaggaatccagacgcttattcaaaagcaaaaagaagtgctggcagaaacattgcctgaactgaaataagaaagagaggcctgatcagcgtgaaagaagccattattgcgacacacaatcagggaaaagtgaaagaattcaaggaaatactcgaaccgaaaggctacagcgtctcttctttggcggaaatcggatttacggaagaaattgaagaaaccggacatacctttgaagaaaacgccatcttaaaagcggaagccgtggcaaaagccgtcaacaaaatggtcattgcagacgactccggtttatcggtggacaaccttggaggcagaccgggcgtttattcagcccgttatgccggagaagcaaaagatgataaagcgaatatggacaaggtgctgtcagaattaaaaggcatcgaaaaagagcagcgcacggcccgtttccgctgcgcccttgccgtcagcatgccggggcgggaaacaaaaacggtcgaaggtcatgttgaagggtatattgcggaaggacccgagggggataacgggttcggctatgatcccatttttattgtaaaagataaagataaaaccatggcccagctgacaagcgctgagaaaaacaaaatcagccacagggctgaggcgctcaagaaactgtcaaagctgcttgattcataagggggagcgtatgcaatgaaagtgctgataataagtgacagtcacggccttgaagacgagctggagacgattgcaaagcggcacgaagacgaagcggatctgatgattcattgcggtgattcagagcttgacgccgcacatccggcgcttacgccgtttcacacggtaaaaggcaattgcgactttggcggcgggtttcaggatgaacttcttctggacgcaggttcaaagaaaattctggccgttcacgggcatcttcacggcattaaacagtcacttttaactgttttttaccgggcggaagagcttggggcggatatcgtctgcttcggccattcacatattgccgggagtgaagagcttcggggcaagcttttgattaatccgggcagcatccgtcttccgagagtccgcaatgtgaaaagctatgccattcttactcttacagaaagagaaggcgccgtgacattttacgatgaaacgggtcgggaattgaaggactttgggaatacaatcagtttttaacaagtgatgggggagatttcattcttccccatcaaaagtttttaaaaaaatattgacttatgatttgaacctgtatataataaatcttgtcgctgatacataaagcaaaagctgtcccagtagctcagctggatagagcaacggccttctaagccgtcggtcgggagttcgaatctctcctgggacgtataaaaaaagagctggtgacatcagagtgaaaactgatgccgctggccttttttatcggatgactatattgtcaattcgctgatatcatggtaaaatgatcagcagaacaatttgattttcatgtcccagtagctcagccggatagagcaacggccttctaagccgtcggtcgggagttcgaatctctcctgggacgtataaaaacctcaagccctgacaatgggtttgaggtttttttgtattttattttttgttttacgaaacaaaagttccgtatttgatgaaaattgtaaagtaattttaatataaatgaaacttaatgtaatatttatcgtaataaatatatgtataaagatacttaaggcgcccttgagtgataaattatctaatttctatcatacattttgtcaatgaatgatagaaagacagcaggaggaattagcttttgaagtacgcatttgcatataaaaatcacaatatagaaacgatcttttgcggaaaagacgagctgtttgaggaactgaagcaatttttaatcactcaatgcggtttaatcattgttgaggtttcaagggctgattactatacggagcaggaaatgaatcaatggaatgaccgttatactctgtgaataagaaaagaaaccggccgtgggaggccggtttttgtatcatctgaatccgctcggagcgctgaagcccccggcatggccgctgaaaccgcccccgagcgcgccgggatgcgccccggcgccgaggcttccgccgacgtcactgaaggattggccgtagtacccggttgtataagggtacggaacgaattgctgcccggcgaatgacagcgtgctttgcggggtctgctgtccgtatccggatgacgggaatccctgctgaaaagaagggccgccttgatttggtgctgtatgcatcggggccggaggatagtaagactgcggcggtaagaccggtaaaggcggaaatccaggaggcaggccctgcatgcctgataacatcttattcatgacatcactcatttcttacgagataagaacagtgtatgcgtatgtctgtagaaagagcctgttcaatcgaacggaatatctgacaagcatgccggaaggacagagaaaaattgtgtaataaaatgtgacatattcgtatatgaacggaaaaatttcatgtaatcttgagagattaataaaaaaatgataaaaacttttaacatttacagatccctttgtaccagtaatgaaagcgtatacaaaatagattgattaatctaaattgtctaataattataaaaatgctgttgacactgtctgcaaacgggcgtaatatgagttcaaacaaaaacaaataaatgattcacgctaaaaagaaaaatcataaaacactgaaaaaacaaacaaatgaaggttcttttttaataaaagagctgccataataaaaagcgcagaagaggataagtagctttgctgaagtttttcacagagagccggtaacgctgagagccggtaaaacaaatcaaagtgaactcccctcagagtgccggtctgaaatatgaagagtaggactcggccgagtgaacgcaatgtttactcgttatcaaaacggatattcattatccatgagacggtctgcatatgaccgtaaacaagggtggtaccgcggaaagcaaagccttttcgccccttttggctatcgcatgaaatgcttggctgaatgtgggtgggaaggcttttttatttgcgtcagccggcgctgcgttttatgaattggattttagaagggaacattgaaaaggaggaactgaaaatgggtacaaatgtacaggcggattctttgtctgccgaatgtacaaaaacaatgaacggggctctgatgctgattgaatcattaaagaaagaaaatgtcgagatgatcttcggctatccggggggagccgtccttccgatttacgataaactgtatcaatcaggattggttcacatcctgccccgccacgagcaaggcgcgattcatgcggcagaagggtatgcgagagtctccggaaagccgggggttgtgattgctacttccggacccggagcgacaaatttagttaccggtcttgcggatgcgatgatagattcattgccgctcgtagtgtttaccggtcaggtggccacttcggtcatcggcagcgacgctttccaggaagccgacattttaggaattacgatgccgattacgaaacacagctaccaagtccgccgtccggaagatctcccccgtgtgattaaagaggcgttccatatcgccacgacgggaagaccgggcccggtattaattgatataccgaaggatgtcgcagcatttgaaggagagttcagatatgatcacgagatcagccttccgggttatcagcctgtaaaagagcctaactatctgcagatccgaaagctcgtggaagctgtcagcagtgcgaaaaagccggttattttagccggagcgggtgttttgcacggtaaagcttcagaagatttaaaaaattatgccgaacagcagcaaatcccggtagcgcacacgcttctcggtctgggcggtttcccggcagaccatcctctttttctgggaatggcggggatgcacggcacatacacagcgaatatggcgctttaccactgtgatttgttgatcagcatcggagcgcggttcgatgatcgcgtgaccggaaatctgaagcattttgcaaaatcggccaaagtggcgcatatcgatattgatcctgctgaaatcggaaaaattatcgaaacgcagattccggtggtcggcgacagtaaaatcgtccttcaggaattattgaagcaaaacggaaaacagggacagacagaggagtggaaacagcagctttcagaatggaaagaagaatatccgctttggtatacagacaacagagaagagggcttgaaaccccaaaagctgattgagtatattcaccaattcacaaacggtgaggcgattgtggcgacggatgtcggccagcaccagatgtgggcggctcagttttatcctttccgaaaggctgataagtgggttacctcggggggactcggcacaatgggcttcggccttccggcggctatcggagcgcagctggccgatcgtaacgccacggtcgttgccatcctcggagacggcggttttcagatgacccttcaggaattagatgtcatccggcagctgaatcttcctgtcaaagtggttatcttgaacaacgaatgtctgggcatggtcagacagtggcaggaaatcttctatgaagagcgctattctgaatccaaattctcggcgcagcctgactttgtcaaattgtcagaagcctacggcattaaaggcgtccggatttcatcggaggaagaggcggaagaagagcttaaaaaggcgctttcatcaaaagaaccggccgttattgacgtccgggtcgccaaaagcgagaaagtattcccgatgattgcgccgggtaaaggacttcatgaaatggtgggggtgaaaccttgaaacgcattatcacattaacggtggtcaaccgctcgggagtattaaaccggatcaccggcctgtttacaaaaagacactataatatcgaaagcatcactgtaggccacacggaaacaagcggtgtttcaaggattacatttgtcgtccatgtggaaggcgaaaatgacgtagagcagctgacaaagcagcttaacaaacaaattgacgtcctgaaagtgacggatattacaaaccaatcgattgtacagcgtgagctggcattaatcaaagttgtttccgcaccgtcggccagaacggaaatcaatggaatcattgagccgttcagagcttccgtcgttgatgtctcaagagacagcgtcgtcgttcaggttaccggcgaatctaataaaatcgaagcgctcatagagctgctcaaaccctacggcattaaagaaatcgcgagaacgggcacaacggcttttgcgaggggaacccagcagaaggcgtcatccaataaaacaatttcaattgtataacacaaaaaagggagagattaaaatggtaaaagtatattataacggtgatatcaaagagaacgtattggcaggtaaaaaagtagcgattatcggttacggttcacaaggtcacgcacatgcgctgaacttaaaagaaagcggaattgatgtcattgtcggcgtcagacaaggaaaatcatttacacaggcccaagaagacggtcatcaagtcttttcggtaagagaagcggctgcccaggctgatatcattatggttcttcttccggatgaacagcagcaaaaagtatatgaagctgaaatcaaagatgaattgacggcgggcaagtcattggtattcgcacacggatttaacgtccatttccatcagatcgtgcctcctgctgatgtggatgtattccttgtcgcccctaaaggaccgggacaccttgtcagaagaacatatgaacaaggcgcgggcgtaccggcattgtttgccatctaccaggatgtatcaggcgaagcgaaagatacggctcttgcttatgcaaaaggaatcggcggagcgcgtgcgggcgttcttgaaacaacatttaaggaagaaacggaaacggatttgttcggtgagcaggctgttctgtgcggaggtttaacggcgcttgtcaaagcgggttttgaaacgctgacagaagccggctaccagcctgaactcgcatacttcgagtgtctgcacgaactgaagttgatcgtagacttgatgtatgaagaaggattggcgggcatgagatactctatctccgatacggctcaatggggagattttgtctcagggccgcgcgtagtcgatgcaaaggtaaaagaatcgatgaaacaagtattaacagatattcaaaacggtacattcgcgaaagaatggatcgtggaaaaccaagtgaaccgtcctcgcttcaatgcgatcaatgcaagtgaaaacgagcatcagattgaaaaggtcggcagacagctccgtgaaatgatgccgtttgtcaaacaaggcaaaaagaaggaagcggtggtctccgttgcgcaaaattaatgttttcgacacgacccttcgtgacggtgaacaatcccccggggtcaacctcaattcccgggagaaactggcgatagccaagcagcttgaaagactcggggtggacattattgaagcgggatttcccgcttcatcccgaggtgattttttagccgtgcaggaaatcgcaagaacgattaaaaattgttcggtaacagggcttgcccgatctgtcaaaggtgacatcgacgcagcctgggaagcgctgaaagacggggccagcccgcggattcacatctttatcgccacctctgacattcatctgaagcataagctgaaaatgacgcgggaagaggttaaggaaaaagcggttgaaatggtgaagtatgcaaaagaacgctttccgatcgttcaatggtcagcagaagacgcatgccgcaccgaacttccgtttctggctgaaatcgttgaagaagtgattgatgccggcgcgagcgtcatcaacctgccggacactgtaggttacctgacgccggctgaatacggaaacatctttaaatatatgaaggaacacgttccgaatatcagccgggtaaagctatcagcccattgccacgatgatctcggaatggcggttgccaactcactttcggcaattgagaacggcgctgatcaaattgaatgcgccattaacggcataggagaaagagccgggaacgccgcgctagaggaaatcgccgttgcgcttcatgtcagaaatgacgcgcatcaagccgattcatctctcaatcttcatgaattgaagcggacgagtgatcttgtcagcaaactgacgggtatggcagttccccgcaacaaagcaatcgtcggagataacgctttcgcacatgagtccggcattcaccaagacggtttcctgaaagaaaaatcaacatatgaaatcatttcaccggaacttgtcggcgtgactgctgatgcacttgtactcggaaagcattccgggcgccacgcgttcaaagaccgcctgaatacgcttggattccagtttgatagtgatgaaatcaataaatattttacgatgtttaaagaactgaccgcaaagaaaaaagaaatcactgatgatgacttgatttctcttattttagaagaaaaagtgacagacaaaaaaatcggctatgaatttttgtctctgcaagtgcattacgggacgtctcaggtgccgactgcaacagtctctttaaaaaatcaggaaaacgaacagctgatgcaagaggcggcaacgggggcgggcagcgtagaagccgtttataatacgctcgggcgctgcatcgataaaaatattgaactgacagactaccgcatccaatccaaccggaaaggcgaagacgcgctggctcaagtttttgtcagagtgaccgtgaacggaaaagaaacatcagggcggggaatcgcgcaggatgttctggaagcttctgctaaagcttatctgaacgccgtgaaccggcagctggtgctggattgcaatttagacggattaaagagacagactgcggtcggctcgtaatagaaaggagaacgtttgatttgaaaaaacgcattgctttgctgcccggtgacggaatcggaccggaagtggcggaatcagcggcagatgtattgaaaagcgttgccgaacaattcggacatgaatttgaatttgaaaacggactgatcgggggagcggccattgacgcccatcaaaacccccttcctgaggagacggtggctctttgtgaaagatccgacgccatcctgctcggggcagtcggcgggccgaaatgggaccaaaatcctccggagctcagaccggaaaaaggcctgctcggcatcagaaaaaaactcggcctgtttgccaatttgcgtcccgtgaccgtatttgaaagcttgtctgaggcatctccgctgaaaaaagaatatatcagcggcgtcgactttgtaatcgtcagggaactgacgggcggcctctacttcggagaaccgagcagacagtatgtcaatgaagcgggagaaaaggaagcggtcgatacccttttttataagaaagaagaaatcgcacgcgttgtcagagaagcctttaagatggctgccggcagaaaaggaaaagtgacgtccgttgataaggcgaatgtgctttcttcaagcaggctgtggcgggaaaccgcagaggaaatcgcaaaagaatttcctgatgtgacgcttgaacatatgcttgtcgataatgccgcgatgcagctcatctacgctccgagccaatttgacgtcatcgtaactgagaatatgttcggcgatattttaagcgatgaagcctccatgctgacaggctcgctcggcatgctgccgtcagccagtttatcaagttcaggtcttcacttgtttgaacccgtgcatggatctgcgcctgacatcgccggtaaagggatggccaatccgtttgcggcgattttatcagctgcgatgcttttgagaacatctttcggacttgaaaacgaagcgcaggcggtggaaaaggcggtcgcaaaggtgcttgcagacggcagccgtacacgtgatatcgcccgggacggccaatatgccggaacgcatgacattactgaaaaagtaaaagccgcattagccggctcgaatacaaaatctatagtgtgacgctttaaagaaagcggtcttagttcataggtagagggaggaaacaaagatgatgcctcgaacaatcatcgaaaagatttgggatcggcatgttgtaaaaagcggtgaaggaaaacccgaccttctctatattgacctgcacctcattcatgaggtgacgtctcctcaggcgtttgaagggttaagacagaaggggagaaaggtcagacggccgcagaatacattcgcgacgatggaccacaatattccgaccgtcaaccgttttgacattaaagatgaagtcgcaaagcgccaagtaaccgcgcttgaacggaattgtgaggagtttggcgtccgtcttgcggatcttcacagcgcagaccaggggatcgttcacgtagtcgggcctgagcttggtctgacacttccggggaaaacgatcgtttgcggagacagccatacatcgactcacggtgcattcggggcgcttgccttcggtatcggcacaagtgaggtggaacatgttctttccactcagacactatggcagcagcggccgaaaacgcttgaaatccgcgttgacggaacgctccaaaaaggagtgaccgcgaaggatgtcatcttgtcggtcatcggaaaatacggggtgaaattcggtaccggatatgtcattgaatacaccggggaagtattcagaaacatgtctatggacgaacgcatgacggtctgcaatatgtcaatagaagcgggagcacgggcgggactgatcgctcctgatgacacgacgattgaatattgtaaaaaccgtaaatacgcgccaaaaggcgaggaatttgaaaaagccgccgcagaatggaaagcgttaaaaaccgatccgggcgccgtatacgatcattccatcgtgttagacggcagcgagatttctccaatggtaacatggggcgtcaatcccggtatggttcttccggtcgatgcccaaataccggcgccggaaacgattgattctgaagacggtaaaaaagaagccatccgcgcgtacgaatacatgggaatctcaccgaatcaaaaaattgaagatattaaagtcgagcatgtgtttatcggctcctgtacaaattcgcggatgaccgatcttcgccaggctgcggatatgatcaaaggccgaaaagtcgctgacagcgtcagagccattgtggtcccgggttctcaaagcgtgaaacagcaggccgaggaagaagggctgcaccgcgtgtttctcgaggccggatttgaatggagagaatcaggctgcagcatgtgcctcagtatgaacaatgatgtcgtgcctgaaggggaacgatgcgcttccacttccaaccgcaacttcgaaggcagacagggaaaaggcgcgagaacacaccttgtcagtccggcgatggcggcaatggcagccattcacgggcatttcgtcgatgtaagaaagttttatcaagaaaaaacagttgtgtaaggagtgcgcgaaaagatggaacctttaaaaacacatacgggaaaagcggccgtcttaaaccggatcaacgtcgatacggaccagattattccgaaacagtttttgaaaagaattgaaagaaccggatacggcagattcgcgttttttgattggagataccttgagaacggtgagcctgatcctgaatttgaattaaatcgcaaagtctatgaaggcgcgtccatattaattgccggagagaatttcggctgcggatcatcccgtgagcacgctccttgggcgctggatgattacggcttcaaaatcatcattgctccgtcatttgccgatatttttcatcaaaactgttttaaaaacggtatgcttcccatccgtatgccgtatgatcagtggaaaaaactcgccggtcaatatgaaaatcagtctcttaacatgacggttgacttggaaaaccagctcattcacgacagtgaaggaaaagagatttcatttgaagtcgatcctcactggaaggaaatgctgataaacggctatgatgaaatttcattaacgcttctgctggaagacgacatacagcagtttgaatcgaaaagaagttcatggcttcaagcctgaaaaaagccgaccggcatctgtccggcggctttttttaccgtgcgcaccatcctttcttgtgtttcctgacgcgtgttgatacacttgaaaaaaatagcgcctgaaaggaaataaagtatgacgcatgacaagaaaaaagctgatatcattcctttcccccgtctgaaagaacgcttggttgataaagggatggccgccatgaaggataaacagtatcaggaggccctcgaactgttctcagaggcggtaagccacggcgataccgagtccgacgtacatttaggcatggcgatttgttttctggaactcggggaattggaagaagcaaaacaagtttgcgagaaaatgctgaatgaagggtacggccattatttcaccgtactgcaggtgtacatgaccattttaattcagctgaaacaatatgaagaagtcaaaagcacaattgaagctgtgctggaagaaaaccagctgcccgcagaaagtgcggagcaattctaccggctgctcgaattcagccgcaaaatgaccgatcccgatcagcaggatgaggcgtgggaggaggaatacgaggacattcttgatgcggaaaaagtgctgaacagccccgctgaacaaatgaatctgattcattctctcaaagaccgcaatattgcaaaatacacgggtctcttaaaaacaattcttcaagatccgggcgctcatcctcttatcaagacgatgattttgacgctgatggcggaccatgactacagcaagccggtccatattacaaaattcggcgattcaatgaccgcggttccgagtgaaacggttcagcctgatgcggctccgattttgcatcgcgttctccgggtgcttgatgaaacgctcggcaatgaaaaccctacattatacgctgccgtcgaggagctgtggagaaggcatctgtacgtcctgcacccttttatgccgaagtttttgaacgcagatttatgggcggcggcgcttcataaggtcggttacgagatgcacggcattgacattgagccggaggaacttcatatgatgtacgagtttgacagccgcgaacttgaagaagcctgcacgatgattaaggatattgaagaaatttcttatttgtaaatcacaccatatagttgaaagcggtaggcgttatgttataatatagtggttgtatttatgtatagcggtttaactgaaatgagaattacggttggacaggctgccagttcattacataatgattctgattcaaagcggttttttctttgacaaagccgcggattgctttagaatggaagaccgacacaacctgaatagatttttggagggaaacacatgtctgtaaaatgggaaaaacaagaaggcaacgaaggcgtattaacggttgaagttgatgccgatacgttcaaaacagctcttgatgatgcatttaaaaaagtagtaaaacaggtttctattcctggattccgcaaagggaaagttccccgcggtttattcgaacagcgtttcggcgttgaagctctttaccaggatgctttagatattttacttcctgtagaataccctaaagcggttgaagaagccggcattgagcctgtagaccgccctgaaatcgatgttgaaaaaatcgaaaaaggcgaaagcttgattttcactgcaaaagtgactgtaaaaccggaagtgaaacttggcgactacaaaggcttaggaatcgaaaaagatgacactgccgttactgacgaagatgtacaaaacgaacttaaagcgcttcaagagcgtcaggctgagcttgtcgtgaaagaagaaggcgctgttgaaaacggcgatacagtcgttcttgacttcgaaggtttcgttgacggcgaagcgtttgaaggcggaaaagctgagaactactcacttgaagtaggatcaggttcattcatcccgggcttcgaagagcagttaacaggccttgaagcaggcgctgaaaaggatgttgaagtaacattccctgaagagtaccacgctgaagagcttgccggaaaaccagctgttttcaaagtgaaaattcatgaaatcaaagcgaaagagcttcctgagcttaacgacgaattcgcaaaagacattgacgaagaagttgaaacgcttgctgaattaactgagaaaacaaaaaaacgccttgaagaagcaaaagaaaacgaagctgacgctaaattgcgtgaagagcttgttctgaaagcgtctgaaaacgctgaagctgatgttcctcaagcgatgatcgacactgagcttgaccgcatgctgaaagaattcgaacagcgtctgcaaatgcaaggcatgaaccttgagctttacactcaattctcaggccaagacgaaaacgcgttaaaagagcaaatgaaagaagatgccgcaaaacgcgtaaaatcaaacctgactcttgaagcgatcgctcaagcggaaaaccttgaagtaacggacgaagaagttgaagctgagctgactaaaatggctgaagcttacaacatgccggttgaaaacatcaagcaggcaatcggttcaactgacgcgatgaaagaagatttaaaagttcgaaaagcaattgattttcttgtagaaaaccgttaatatggttcataataatagacataataaaacagggcgcgattaattcgtgccttgttttgtacaattatgatataactctttttcttggggcaagatagtcattgccgggctgtttttcgtcatacatatagaatgtgcaagtgcgaaacacattgttaccgtcttactggaaagtatggtaaaatgcaatacatactcgatcgtagcaagaaccgttttcttttgcccttcaggtaaaagaaaaagtgagacaagattaaggggtgaaagaatgtttaaattcaacgaggaaaaaggacaattgaaatgctcgttctgcggaaaaacgcaagatcaggttcgtaagctggttgcaggaccgggtgtatatatatgcgacgaatgtattgagctctgtacagaaatcgtagaggaagagcttggtacagaagaagaagtcgaatttaaagacgttccgaagccgcaggaaatccgtgagattctgaatgaatatgtcatcggacaggatcaggcgaagaaatcacttgcggttgcggtatacaaccattacaaacgcatcaactccaacagtaaagtggatgatgtcgagctttctaaaagtaatatttctttaatcggaccgactggaagcgggaaaacacttcttgcccagacgcttgcgcgtattctgaacgtgccgtttgcgatcgcggacgctacatctctgactgaagccggatatgtcggtgaggacgtagaaaacatcctcctcaagctgattcaggcagcagattatgatgtggaaaaagcagaaaaaggcattatttatatcgatgaaatcgataaagtagcgcgaaaatctgaaaacccgtccattacacgcgacgtatcaggcgaaggcgttcagcaggcgctgctgaaaattcttgaaggaacggttgcaagcgtgccgcctcaaggaggacgcaaacatcctcatcaggaattcatccagatcgatacgacgaacatcctgttcatttgcggcggtgcatttgacggcatcgaacaaatcatcaaacgccgtctcggacaaaaagtcatcggcttcggctctgataataaagcggcagatctggaaaaagaagaactgctttctaaagttcttccggaagacttgctccgtttcggtctgattcctgaattcatcggccgtcttcctgtcattgcaagccttgagcagcttgacgaaacggcactggttgaaattctgactaaaccgaaaaacgcactcgtcaaacaatacaagaaaatgttagaacttgatgatgtcgagcttgaatttgaagacgaggcattatctgaaattgcgaaaaaagcgatcgagcgtaaaacaggcgcacgcggcctgcgttctatcattgaaggcatcatgcttgacgtcatgtttgatctgccgtcccgcgatgatattgaaaaatgtgtcattaccggagcgacagtcgcagacggtgaagcaccgcgtcttgtattaaaagacggcacagttgtcggccaagataaaacatcagcataacatgacaaaacctcctgactcgaattgatcaggaggtttttttcttgtcctgacccttctgaaaatgtttattccgggctttgctgggagatactagcggacagaggaatgaattggatacataaatcgttttttcaggagggaccagcatgagttggacagggatcgcattatttgtacagctgtttttcgggatagtcatcggattatatttttggaatctgctcaaaaaccagcgtacacaaaaagtgacgatagataaagaatcaaaaaaagaaatggaacagctgcgcaaaatgcgcgccatcagtttatcagaacctttatcagaaaaggtgcggccgaaaagctttcaggacattgtcggccaggaagacggaattaaagcgttaaaagcagcgctttgcggaccgaacccgcagcacgtcattatttacggtcctccgggagtcggtaaaacggctgcggcgcggctggtattggaagaagcgaaaaaacataaacagtcaccgtttcaaaagcaggctgtttttgttgaacttgatgcgacgaccgcgcggtttgatgaacgggggattgccgatccgcttatcggttcagtgcatgatccgatttatcagggagcgggagcgatgggccaggcaggcattccgcagccgaaacagggggctgtgacccatgctcacggcggggtattgtttattgatgaaatcggcgagcttcatccgattcagatgaataaaatgctgaaggtgcttgaagatcgaaaagtatttttagacagtgcgtattacagtgaagaaaatacgcaaataccgaatcacattcatgatatttttcaaaatgggcttccggcagatttccgtttgatcggagcgacaacgagaatgccgaatgaaattccgccggccatccgttcgcgctgtcttgaagtatttttccgcgagctggaaaaggatgaacttaaaatcgttgcgaaaaaagcagccgacaaaattcagaaagagatttctgacgaagctctcagtgtgctgaccacatatacgagaaacggacgtgaagccgtcaatatgatccagatcgccgccggcatggcggtgactgaggacagaaaagaaattacgacagaagatatagaatgggttgttcattccagtcagcttacacctaaaaatgagcagaaaatcgccgatgaaccgcaagtcggcatcgtgaacggacttgccgtctacgggccgaacagcggcgcattgctggaaatcgaagtgaatgtcacacctgcgcaggacaaaggaagcctgaatatcacgggaattgcagaggaagaaagcatcggcagccaatcgaagtcgatccgccgcaaaagcatggcaaagggatctgtggaaaatgttctgacggttctgcgcacaatgggcatcaaaccttcagactatgacattcacgtcaattttccgggcggaggcccgattgacggaccttcagcaggtatcgcgatggccgcggggattttttccgcgattcaccgcatcccgatcgaccatacggtggcgatgacgggagaaatcagcctgacggggcttgtcaaaccgatcggcggcgtcattccgaaaattaaagccgcaaaacaggccggagcaaaaacggtcattatcccatatgaaaatcagcagtccattctgaaacgaatagacggaatcaccattaaagcggtaaaaacgttccaggaagtgctggacgtcatattggttgaccctccttcagaacaaaaaccgtttgatatccaaatgaataaagaatccgtataaaccccatttttataatggggtttttttatggaggacatcttttcctttttcagaacagaaagaaagggtatactacgaagagactgttttatatacagggcaggcggataagccgattttgcccgatcccggaattgtacaacgatgaaaaagttgtattataatggttcatactaaagtcacggaggtgtcagtcacatggcagaagatacaaaacgcagcatcccgctcctccctttaagaggcttattggtatacccgacaatggttttacatttagatgtaggccgtgacaagtcggttcaggctcttgaacaggcaatgatgcatgatcatatgatttttttagccactcagcaggatatttcgatagacgaaccgggtgaagaggatattttcgccgtcggcacttatacaaaaattaaacagatgctgaagctgcccaacggtacgatcagagtgcttgtagaaggaattcagcgggcgcagatccttgaatacaccgaactcgaagattatacttcggtcgatatacagctgatgcatgaggatgattcaaaagacgtggaagacgaagcgcttatgcggacgctgctggaccattttgaccagtacataaaaatttctaaaaaaatctccgcagaaacgtatgcggctgtgactgatattgaagagcccggcagaatggcggatatcgtcgcttctcatctcccgctgaaattaaaggacaagcaggacattttagaaacggcggatattaaagaacgtctgaataaggtcatccgttccattcataatgaaaaagaagtgctggagattgagaaaaaaatcggtcagcgcgtcaaacgttcgatggaacgcactcaaaaggaatactacttgcgtgaacagatgaaagccattcagaaggagcttggcgacaaagaaggaaaaaccggcgaagttcagtcgctcacggaaaagatagaagaagcaggcatgcctgagcgtgtcaaagaaacggcgcttaaggaattaagccgttacgaaaaagtgccgtcaagctcagcggaaagctctgttatccgcaactatattgactggctcatcgcccttccgtggtcggatgaaacagaagataaacttgatattaaaaaagccggggaaatcttagataaagagcaccacggcttagagaaagtgaaagagcggattttggagtatttggccgtgaaacagctgacgaaaacgctgaaagggccgattctttgtctggccggacctccgggagtcggtaaaacatctcttgcaaaatcaatcagtacgagcatggggcgccgttttgtgagaatttcactgggcggagtgcgcgatgagtctgaaatccgcgggcaccggcgtacatacgtcggagcgatgccgggccgtattatacaggggatgaaaaaagccggtaaacaaaatccggtctttctcctggatgagatcgacaaaatgtcgtctgatttcagaggcgatccgtcttcggcgatgcttgaggtgctggatccggaacaaaacagcacattcagcgaccactatattgaagagacgttcgatttatcgaaagtgctgtttatcgcgactgcgaataaccttgcttccataccgggacctctcagagacagaatggagattatcagcctgtcaggctacactgaaaacgaaaagctggagatcgtgaaggaccacctgcttccgaaacaaatcaaagagcacgggctcacaaagagcaacctgcagattcgggaccaggcgattacggacatcatccgctactacacgagggaagccggcgtgagaacgcttgaacgccagattgccgccatttgccgaaaggctgcaaaagccattgtgtctgaggagagaaaacgcattaccgttacagagaaaaatctggccgactatctcggaaaacggatattcagatacggacaggcggaaaccgaagatcaaatcggggttgtcacggggcttgcgtatacgacggtcggcggagatacgctgtcaatcgaagtgtcattgtcaccgggaaaaggaaagctgattctgaccgggaagcttggagatgtcatgcgggaatcagcgcaggccgctttcagttatgtccgctcgaaagcggaacagttcggaatcgatccgaaattccatgagaagtatgacattcatatccatgtccctgaaggagcggtgccgaaagacggcccttctgccggaattacgatggccacggcgctcgtttcagcattaacggaccgtgcggtaaaacgcgaagtcggtatgacgggagaaattacgctgcggggccgcgtgcttccgatcggcggactgaaagaaaaggcgctcggcgcgcacagagcgggcctgaccactattattgcgcctaaagataacgaaaaagatatagaggatattccagaaagcgtcagagaaggactgaagtttatattcgtttctcacctggatgacgttttggaacatgccttagtaggagagaagaaatgaaagtcacaaagtcagaaatcgtgatcagcgcggtcaaacccgaacagtaccctgatggggggcttccggaaatcgcgctggcgggaagatcaaatgtaggaaagtcatcttttatcaattcattaatcaatcggaaaaacttggccagaacgtcatcaaaaccggggaaaacacagaccttaaacttttacatcatcaatgatgaattgcattttgtcgacgttcccgggtacggatttgcgaaagtttccaaaagcgagcgggaagcatgggggagaatgattgaaacctatatgacgacccgcgaagagctgaaagcctgcgtgcagattgtcgacctcaggcacgcgccgtctgctgaagacgtgaacatgtatgaattcctgaagtattacggcattcccgtcatcgttatcgcgacaaaagcggataagattccaaaaggaaaatgggacaagcacttaaaggttgtcaaacagacgcttgatatggatcctgaagacgagctgattttattttcctctgaaacgaaaaaaggcaaagatgaagcatggggagccattaaaaaaatgatcagccggtaataaaaaacccaaaacgcagtgcgttttgggttttatcgtatagttttgttccgcttgataaacaataataaaaggctgattccgatgaaaacatacggccagtatgttttgaagtgttccgtcggaatatggacggactccagccacgccgtaatttgtttaaagaagtataaaaagagggaaaaaccaatcatggcaaccgcttcgtatacatattcttttctggctgccgcaaataaggagaatccgaagacgaagagaatcatttcaaaatctcccggccaccatgagagctcaggtttggcgaaaaagtgtaaacctatgccgaaaagaagcatgccgatcaggacgtgaggcccggccgcttcctttttgccctgatacaagagcgcagcgcccaaaagcataaggagcaccggccattccccctgattcgcaaacaggtgaacctgtccgctctgaagccatgcgaataatgaagcggcaagcagaagtcccggtaataaaattgatgtttttttcatcctgtcacctacccgcagtaaaggatttttagtatgatgattacagtggaaacgagctttttatactatagcataacatttttgaaatctgttcacattttcccgaagaaactatgttataattattataaataataaattctatgttagaatgattataaataaattgcgatgtacgggggtgcatgaaagcgatgcatattcttgttgtgggagtagattataaatccgcccctattgaaatacgcgaaaaaataagttttcagccggatgagcttgcagaagcgatgcttcgtttaaaagaagaaaaaagcgttcttgaaaacattatcgtgtcaacctgcaaccgcaccgaaatatatgcggtggtcgaccagcttcataccggccgttattatataaaaacatttttatccgaatggttctcgctgccgaaagaagagctgtctccgtttctgaaattttatgagagcgacgcggcgatcgagcatttattccgtgtggcgtgcggcttggattccatggtcatcggagaaacgcaaatactcggccaggtccgctcgagctttaaaacggcgcaggcagaaaagacgatcggcaccattttcaatgagctgtttaaacaggcggtgaccgtcggcaaacgcacgcatgccgaaaccgatatcggcgccaatgccgtttccgtcagttacgccgccgttgaactcgcgaaaaaaatcttcggctcattgtcaaataagcacattttgattctcggtgcgggaaaaatgggcgagctcgccgcagaaaacctgcacggtcagggcatcggcaaagtaacggtcatcaacagaacgtttttgaaggcaaaagcgcttgctgaccgtttctccggagaagcgcgcagcttaaaccagcttgaacatgcacttgctgaagctgatattttaatcagttcgacaggcgcaagtgatttcgtcgtgtctaaagaaatgatggagagagcgggcagacagcggaaaggccgtccgttatttatggtggatatcgctgtgccgcgagacctcgatccggcgctgaacgatcttgaaggtgtttttctgtacgatattgatgaccttgaaggaatcgttgaagccaacttacaagaacgccgtgaaactgctgaaaaagtcgagctgttcattgaagcggcaattgttgagtttaagcagtggcttaatacgctcggcgttgtgccggtcatttcggcgctgcgtgaaaaggcgctgtccatccagtccgatacgatgcagagcattgagcgcaagctgcctcatctgacggtaagagagaaaaaacttctcagcaaacatacgaaaagcatcattaaccaaatgctgcgcgacccgattctgaaagcgaaagagcttgcggctgaagcggattcagatgaaaagctgaagctgtttatgcagatattcgatattgaggaagaggccggccgtcagctggacaaaagcctggataaccgccagacggttcattcgtttcaaaaggcagaagcaaaaacgggcttacgtccgcttgtaagtgagtgagggctgtatgattgatacagcaatggcaagacttaatgaagcgacaattgttatttatgcagtaagcgtccttttttactttatagattttcttcaacacaaccggaaggctgggaaaatggccttctggttgctttctattgtctggactctgcaaaccgtctatctttcttatttcatgtggcagacgggcagatttccggtcttgaatattacggaggccctttacttttatgcgtgggtgcttgtcacgctctcacttgtggtcacgcagattctgcgcgttgattttatcgtgtttttcacgaatgtcatcggtttctcgatgattgcgatccatacgttttcaccgacggatcagcattcggccgctttttccggccagctggtctcagagcttttggtcattcatattacaatggcgattctgtcttacggcgctttttccctttcttttgtcttttcgcttctttatcagtttcaatattctttattaaagaagaaaaagtggggaaaatggctgttgagaattgaagatttgtcaaaacttgattatatggcttacgttttaaatgtcatcggggttccgatgctgctgttgagcctgatattaggcgtgatctgggcgtatgtgtcgctggaaacgctgtactggtttgattcaaaagtgctcggctcgtttattgtgctgcttttatacagctactatttatatatcagattgattaaggaactgcagggaaaagtggcggcgttatggaattcagcatgttttctcgtgctgatgattaattacttcctgctcggaagcctgtcgcaattccattggttcagttaacgaacgcgcccaaacagattcgggaggaaagaaaatgagaacgattaaggtaggttccagacggagcaaactggctatgacccagacaaaatgggtgattaacaaactgaaggaattgaacccttcctataactttgaaatccgggagattgtcacaaaaggcgaccgcatccttgatgttacactgtcaaaagtgggcggcaaaggtttgtttgtcaaagagattgaacaggcgctgctgcatcaggagattgatatggcggttcacagcatgaaagacatgcccgccgttttgcccgagggtcttgtcataggctgcataccgaaacgtgaggacccgcgtgatgctctcatttcaaaagggcatcaaaagctggacgacataaaagaaggaggcatcatcggcaccagcagtttaagaagaagcgcccagattcttgctgaacgccctgatcttacaattaagtggatcagaggcaatatcgatacgagacttcaaaagcttgaaacggaagattacgatgctattattttagcggctgcgggactttcgagaatgggctggaaagatgatgtcgtatctgaatttctcgaaccggaccgctgtctgcctgcggtcggccaaggcgctcttgctattgaatgcagagagtcggatgaggagcttttgaagctgtttgcgcaatttaccgatgagtatacgcagcgcacggtggcagccgaacgggctttcttacacgcgatggaaggcggctgccaagtgccgatagccgggtatgcgtccgtcaatgaccgggatgaggttgaattggtcggtcttgtcgcgtctccggacggaaagacgatttataaagaaacagcggcgggacatgatccggaagaaatcggaaaacgctgtgcggcgatgatgtctgaaaaaggagccaaagcattaatcgacagtgtaaaacaggagctcgatcaggatggcaaatgaccttcctttacaaggaaagaccgtgcttgtcacccggaacaaaagacaggccgcaccgttccgaaaaaaagtggaggcgctcggcggaacggctgtttccgcttcgctgatcgcttttcaggaagcgctcccggatgaatgtgcggacagtctccgggaagacctttctgagccgggatggcttgtgtttacaagcgtaaacggtgtccggttctttttttcctatcttgatcgtcacggtcttgcgctttcgggacggaaaaaaatcgcagccgtcggtgaaaagactgcgcgcgccctgaaagagcggggagcccggacggatgcgatgcctgacgagtatgtggcggaatgtctggctgatactttaaaacggcacgcatcagctgccgaacccatttcagtgataaagggcaatttatcacgcgatgtcataaaagcggagcttgagccgcttggctatcaaataagggaatgggtgttatacaataccattcaggatgaaaaaggcatggacgagctgagacgggctgcatcccgctctcattttgattttattacgtttaccagctcatcggcggtgcatacgtttatgcacgcggtcggagacggagaaaaagcgtgggaaaacagcggtgcgagctatatcagcatcggccctttgacagagaaagcgctcttggaatacgggatctcatcccatgtgcctgacacttatacgattgaaggcatgctggacgtcatgtgcagcatgtcgggaaaggattgataatgatgaatcaaacatttaacagacaccgccgtttgcgcgcgaacgctgcgatgagagatttagtaaaagaaacacgtcttcacccctcagattttatttacccgttatttgtcgttgaaggactcgaaggaaaaaaagaagttccttccatgccgggggtttatcatgtatcactcgatttgttaaaggatgaaatggctgagctgatatcgctcggcattaagtcggtcatcgttttcggcgtgccggaagaaaaagacgcctgcggaacccaggcttttcatgatcacggcattgtgcagaaagggattgctgaaattaaaaagcattatcctgaaatgatcgtaatcgctgatacgtgtctctgtgaatacacggatcacggccattgcggggtcgtgaaagacggagaaatcctcaatgacgagtcgcttgaactgctggctcagacagccgtcagccaggccaaagccggcgctgacatcatcgctccttcaaatatgatggacggttttgtcacagtgatcagggaagcgctcgacaaagaaggattcacgaatattccgatcatgtcttatgccgtaaaatattcaagtgaattttacggtccgttccgcgacgcggctgacagcacgccgcagttcggagaccgaaaaacatatcagatggatccggccaaccgcttggaagcgctccgtgaggctgaatcagacgcggcagaaggcgctgactttttaatcgtcaaaccgtctatgtcatacttagatattatgcgtgatgtgaaaaaccgccatcacctgccgctggtcgcatataatgtgagcggggagtattccatggtgaaagctgcagcccaaaacggctggattaaagaaaaagaaatggtgctggaaattttaacgagcatgaaacgtgcaggagccgatctgattatgacgtatcatgcaaaagacgcagcaaaatggcttgctgagtaacgatttcatttgacgggagctgagacagatgagaagctatgaaaaatcaaaagccgcttttaaagaagcgcagaaactgatgccgggcggagtgaacagcccggtgcgcgcgtttaaatcagtcgatatggacccgatctttatgcagcgcggaaaaggatcgaaaatttttgatattgacggcaatgaatatatcgactacgtcctgagctgggggccgctcattttgggccacacgaacgaccgggtcgttgaaagcctgaaaaaagtagccgagaacgggacaagtttcggagcatctactgaggtggaaaacgaactggccaaattggtcattgaccgtgtgccgtctgttgaaatcgtacggatggtcagctccggcacagaggcgacaatgagcgccctgcgtctggcaagaggatataccggccgcaacaaaattttgaaattcgaaggctgttaccacggccatggtgattcactgctgatcaaagcgggatccggagtggcgacactcggccttccggacagcccgggcgtgccggaaggaatagcaatgaatacgatcaccgttccatacaacgacttggaaagcgttgcactcgcatttcgggagtacggtgaagatattgccggggtcattgttgaaccggtagcaggcaatatgggcgttgttccgccgcaggaaggctttttacaaggacttcgcgacatgacggaacagtatggcgcgctgctcatttttgatgaggtcatgaccggttttcgcgtggattataactgtgcgcaagggtatttcggcgtgacgcctgacttaacgtgtctcggcaaagtcatcggcggcggtcttcctgtcggtgcgtacggcggaaaagctgacattatggaacgaatcgcgccgagcggtccgatctatcaggctggaacattgtcaggaaatccgcttgccatgacagcgggacttgagacgttacagcagctcacacctgaatcttaccaagaatttgtgaaaaaaggcgatatgcttgaagaaggcatttcaaaagcagctgcagcacatggcattccgcacacgtttaaccgggcgggttcaatgatcggcttctttttcacaaatgagcctgtcattaactatgaagcagccaaatcatctgatttaaagctgtttgctaaatattataaagggatggctgatgcaggcgtatttctgccgccgtctcaatttgaaggattgtttctctccactgcgcatacaatggaggatattgaaaaaaccattcaagccgctgagaaagtgttccaggcgatcagccgctgatacagaaaagccgatgcaagcaagacttgtatcggcttttttcaatgcctccattatcatatttttccggattgcggcatacacctttagtgacatctaattgtatggattagatgaaaggaggatatgaacttgccgcataatcaccgattgcaattttctgttgaagaatcaatctgtttccaaaaaggacaggaagtttctgaattactttcgatttcattagaccctgacatcagggtgcaggaagtaaatgattatgtctcaattaaaggatcattagaacttactggcgagtacaacatagatcacagcagtcattttgaagagcttgacagggagctgaggcatgtagaggaagtgagggcgagggaggatggcacggccgagctcattcattgtttcccggtggacatcacgattccgaaaaataaagtgagccacctcaatgatgttttcgtatttatcgatgcctttgattatcagctgacggattcaaggatcttaaccattcaagctgatttggcaattgaagggctgcttgaggaatccgagccaaaagagccggagatccctctgtacgtggcacctgaatttgccagagaagaaatgatcaatcttgccggacatcattcggaggacgaaaacgaaccagaattaatgatacgccatgagcctgaaatacctttgagtgtatcaaaagaagcagcacaagaaaccgagaagaacgaggaagaaaccccgcctttactcaggcaggaggaagaagagcaggaagcagccccgattctgagggagcgggaagaagaagagcaggaagctgccccgcttctgagggagtgggaagaagagcaggaagctgccccgattctgagagagcaggaagaagaagagcaggagactgccccgcttctgagagagcaggaagaagaagagcaggaagcagccccgattttgagggagcgggaagaagaagagcgggagactgccccgattctgagggagcgggaagaagaagagcgggagactgccccgattctgagggagcgggaagaagaagaggagcaggaagctgccccgattttgagggagcgggaagaagaagaggagcaggaagctgccccgattttgagggagcgggaagaagaagagcaggagaccgccccggttctgagggagcaggaagaggtgccgaaacctgtttcctttactgagcctcctcctcccgtttccttccaacaagaagaagagccggaagaagctgaggagcctgcaatcatgtcgtctgtgaggaatgaacctgtatttgaggatgattcagcagaagtgcaggaagagccaaaagatgataacgagccggttttccctgcgttcactctgactccgcatgcagaaaaaccaaaaattgcggaacagcccttccttcaaaaagaagagcagccagaggccgagccgcttctccgtcagagtgatcatgaggcggcagaagacgaagatgagcctgcggtttttcaagaagagcaggcgcccgtttatcgcgagttcgttccggaacggcaggaagaggagttttacagcgctcctaagctgcttgaagaagaggctcatgatgaagaagggtttgaaattgaggtaaggaagatggcgcagccggaggaggaaaccggaaagcctctcgatttgtcttttcagttttccaaactgccgcctgaggagccggcgcaagctgaaccgcctgagccgcttaagtctgaaagaaagaatgaagaagcggcaccgggaaccgagcagaaggaaaatgacaactctcattacttgacaaaattatttacaagggaagaagaaaagttttcaagaatgaaaatttgtatcgtacagcagcaagatactatcgaccgggtgtgtgaacgatatgacataacatcccagcagctcatcagaacgaatgctttatcgtttgatgacgagcttgaagaaggtcagcttctgtatatacctgaatataataacagccatgcgtaagcacaaagaggccgtaaaaatgtggtgaatggaatggaagcagtccaatcagtgcttcaggaatacgggctggcggctgagtatattgagcctgtcagcccgcatgtttggaaggtctactcaaactacggcatttttgctttgaaacagctcaagccggcccgcagcagtgaatttacggatcttatgattgagattgaggagaaaggctaccgatcatttgtgccgatctgccgcacgtatgccggcgatttttttgcgggaagacagacggagaattcttattatttaatgccttggcttcagtacgatcaggaagaggaacgggatcaaaaacatgtttacctttttaaagaggtcgcgaagctccactccgcgactgtgcgggacatccaaatccggactgaagatatcagcggcttttatgaagcaacgaaaagagattgggaaaatgataagcttgtctatgaacaattcgccgaccgggcggaaaaagagtggtatctttcaccttttgaactgcaggctgttacgtatcttacagaaacggtttctgccgtcaattttgctctcgaacgtctggaagaatggtttgacgcggcaaaggatcatgacaagacgagagcggtgatcaaccacggcagcttatcgagccgccactttctgtataatgatgcgggatcgggctttttcacgaatttcgagaaagctgcgctgggccctccgcaaaacgacctgctcggcttttactccagaatgttcagaagctatccgaaagcatgcccggaatgtctggactggttttatacgtatcacaaatcattcccgctccgtgaagcggaaatcagtctgtttctcagctatatggcttatccgtccgccatgtacaaagtgctgaaacggtatcagaccggccaaaggggctctgaaaaagaagagtgcacgcaattattaagagcgttttggcagatgaaaaatgttgagccttttctcatgaaggttcatcagattgagcgggagaaaaaaataaaagcggaaaacgagtcctcttcataacgggactcgtttttttatatccattccaaatgcagggcgcacgctaaaaacagcaggatggcaagcagcaggacatcaaaagtcgtcggaaagaaaatcgtcctgatcccctgaaagatcgtaatcgggataatgacttgcacggatacaaggcggacctgtctggcccactgggggagcgaataagaattgaatttttttctcacgggcaattcctcctcacattcgcctttctatgtatcgtatgtaagggaaagggcggggtgcatgcccatttatgtatgaccgcagcggtttttggaaaagatgattgacgaatcaaaaacacttttactataataaagaacataataaataaaatcatgagctgatataaatacacctgctttgaacgggaagagtacaagaaagacgcatgaagagagagaagctactgtgctgaaaggcttcttatgccgtctcattggaaggtcgcccgggagcataatttcttgaacatacagtagagaaattcgggccgcacccgttatccgtttaagtgcatgaacaaatctgttcatgaaaaaaggtggtaccgcgaaagagcttttcgtcctttatcaggatgaaggctcttttttagttgctcagccatttctaaacatgctggagggttatcatggatacaaacgaacaaacaatgccgacaaaatatgatccgtctgcgattgaaaaaggccgctatgatttttggctgaaaggaaaatattttgaagcgggcggcgatcaaacgaaacagccgtattctgtcgtcattccgccgccgaacgtgacgggcaggctgcacctcggacatgcgtgggatacgacgctgcaagatatcgttacgcgtatgaaacgcatgcagggctatgacgtgctctggcttccgggcatggaccacgccggcatcgccactcaggcaaaagtcgaagcgaaactccgcgaacagggcacaagccgttatgatctcggccgtgaaaagtttttagaagaaacgtggaagtggaaggaagagtatgctgatttcatccgcagccaatgggccaagatgggactcggactcgattattcacgcgaacgttttactcttgatgaagggctgaacaaagccgtgcgggaagtattcgtcaagctgtacaaaaaaggcttgatttacagaggcgaatatatcatcaactgggaccctgccacaaaaacggctttatccgatattgaagtaatttacaaagacgtacagggcgcgttttatcatttgcgctatccgttagcagacggttcaggcttaattgaaatcgcgaccacccgtccggaaacgatgcttggcgacacggctgtcgcggttcatcctgaagatgagcgctacaagcacttaatcggcaaaacggtgattctgccgattacaaaccgcgaaattccgatcgtcggcgatgattatgttgatatggaattcggatcaggggccgttaaaatcacgcctgcccatgacccgaatgactttgaactcggaaaccgccacaatttagagcggattctcgtcatgaatgaagacggaacaatgaatgaaaaagcgctgcaatataacggcatggaccggtttgaatgccgcaaaaaactcgtcaaagatcttcaggaatccggtgttctctttaaaatcgaagaccatatgcattctgtcggacatagtgagagaagcggcgccgttgttgagccgtacctgtccacgcaatggtttgtcaaaatgcagccgctggccgatgctgcggttgaccttcagtcaaaagaagagaaagttcacttcgttcctgaccgtttcgagaaaacgtacctgcactggatggaaaatatccgtgattggtgtatttcccgtcagctgtggtggggccaccgcatcccggcttggtatcataaagaaacaaaagaagtgtacgtcggccttgaggcgcctgaggacagcgaaaattgggaacaggattcagacgtgcttgatacatggttcagctccgcgctttggccgttttctacaatgggctggcctgatgaaaacgctgaagactttaagcggtattactcaaccgatgttcttgtgacgggatatgacatcattttcttctgggtatcccggatgattttccaaggtcttgagtttaccggtgagcgtccgttcaaagacgtgctgattcacggcttaatccgtgacgagcagggcagaaaaatgagtaaatcccttgggaacggcgtggacccgatggatgtcatcgacaagtacggagcggattcactgcgctatttcctggcaaccggaagttcaccgggacaggatctccgtttcagctatgaaaaagtggaatccacatggaacttcgcaaataaaatttggaacgcctcccgttttgcattaatgaacatggacggcatgacgtatgacgagcttgatctgtccggtgaaaaatcagttgctgataagtggatcctcacaagactgaatgaaacgatagaagacgtaacccagcttgcggatcgttatgaattcggcgaagtcggacgccacctgtacaactttatctgggacgatgtgtgcgactggtatatcgaaatggcaaagcttccgctgtacggggaagatgaagcggcgaagaaaacaacccgttctgttctggcatatgtgcttgaccagacgatgcgtcttcttcacccgtttatgccattcttaacggaagaaatctggcagcaccttcctcatgaaggcgagtcaatcacgatcagctcttggccggttccggtgccggaacatacggataaagaggcagcggcggatatgaaactgctcgttgaattaatccgttctgtccgcaatatccggagcgaagtcaacacgccgatgagcaagcaggttgagctttacattaaaacagctaccgaagacattgccggccgccttgagaagaaccgttcttacgttgaacgctttacgaatccgagcacgctgaaaatcgggacggatatcactgcggcagacaaagcgatgacagcggtcgtcaccggagcggaagtcattctgccgcttgaagggctgattaacattgatgaggagatcgcccgtctgcaaaaagaattcgacaagctgacaaaagaggtcgaacgcgttcagaaaaaactcggcaacgaaggattcattaaaaaagctcctgagcatgtcattgaagaagaacgcggaaaagagaaagactacacggcaaaacgcgaagctgtccggcagcggattgcagagctgaaaggctgataaaacagcggggcggtttcctaagaaaccgccttgtcgtataaaagaggggatttcattgtttaatacgtacaaagaagcgatcagctggattcacggcagactcaagttcggcgttaagccgggccttctccgtatggaaaagctgatggaaaaactggaacacccggaaaagaacattcgcgccattcatgtggcgggcacaaacggcaaaggatcgaccgtcgcttttatccgttccgtgcttcaagaagccggttatacggtcggcacgttcacatcgccttacattattacgtttaatgagcgtatcagcgtcaacggcacgccgatttctgatgaggaatggagaacgctcgttaatgacataaaaccgatagtcgatgagcttgataagaccgatgccggaacggtgacagaatttgaaatcattacagcgtgtgcatttttatattttgcgaagcgggctgatatcgattttgtcatttttgaagcggggctcggcggcacatttgattcaaccaatattgtgaatccgctcctgtcggtcattacaagtatcggacatgaccatatggcgattttaggaaataccatcgaggagatcgccgggcagaaagccggtatcattaaaaattccattccggtcattacgggcgtcaatcagccggaagcactcggcgtcattgaagcggaagccgaaaaaaagcaggctccgtatcagtcactatataaaacgtgcagactgtttaatgaagcggcgcttccgtccggtgaaagcttttcgctggaaacggaaacgaaatgctatgaaaacattcaaacgtcgctgatcggcattcaccaaagacagaatgcggcattggcgatattggccgctgaatggctgaatcgcatggaagccgcagccattactgaagaagcgatacgaaacggcctgaaaaaagcatcgtggccgggccggtttgaacgtcttcaaagccgccctttagtgtttgcggacggcgcgcataacgaagagggcgttgaaacgctgacagaaacgatccggcagcgctttgccggtaaaaacgtccatgtggtattcagcgcattaaaagacaaaccgtatcaggaaatgattaaaaagcttgaaaccgaagcggattccattcactttgtatcatttgactttccgcgtgcttcaagcgccgaagccctttataacgcaagcagtctagcggataagagcttcgatgagaacccggacagtgtgaaagaatggatagaacaaaaagacggggcggatgatgtcatcatcattaccggctccttatattttatttcagaaatgagaaagcggcttatctgacagcccctcggatgcccggcggaccattttacggttttgccgggtgtttttatgctgaaaatatattttcagccatttcagtcatggtgtttttctttgctataatctgagccagattgataagtaaaggtgtggtctgagtgcttttaattctgttttttctcggcttgattttcggttcttttttttatacagcagcgtgccgtatcccgcttcgaatttcggttatttcgccgcgttcagcctgttcgttttgccgcttgccgctctcttggggggagcttgtgcccgtcgtttcctatattctgcaaagaggcagatgcagaaactgccgtgcaaagctgtcggttatgtatccggcggcggaatgctggacggcgtgtttattcacggctgcaggcattcatttcggtttctcaaaagaactgttagtcgcgctgttatttctgtctctgctcatgattgttaccgtgacggatctgcaatatatgctgattcctgacaaggttctgctgttttttcttccgctttttatcgccggccgtatgttttctccgctggattcatggtatgcagggtttgccggagccgtttgcggattttttctgcttgtttttatcatgtttgtcagtaaaggaggcatcggcgcaggtgatgtgaaactgtttggggtgatcggcctgacgctcggcgtgaagctcgtgctcattgcattctttctttccgttatgatcggagccgtatacggtatgtgcgccgcagcccggggcaggcttggtaaaaagcagccatttccgtttgcgccggccatctcagccgggagcgctttgagttatttatacggtgaagagctgttttcgttttacatcaagctcgcttcaggcggggcttgaaaaatttggcgaacgttttttggacaagacgacaaaagtcttgttcttttttttttcgcctatgctaaagtgtgaaccatgatcagttcaaagtacggccaagacgaatgcaagggggaagagacgttgaaaaaaaggaagagcaaaaagcacagcaacgcaaaaaacaatgcccttaaagtaaccattaacggacaagaagaaacgatgtatggacaagaagatgtgaaagaaggcggggagaaaaccgtcacattttcaaattgggaagaaacaaaaaaggcggagcaggagaccgctgcatcccatgaagatccgaaagaagaagatttcaattgggatcatgagaagaattctgaggtatttgaagatgacccgaaagtcgttccgccataccagaagaaaaaaaacggccctcattttccgaaaaaaaagcagccgtcttctccagttaaaaaagcggtcacgacaattgctgttgcggctgttttaggcaccgggctcggccttgtcgccttaaatatgtcgggaagtaaagaagcctccgctccagcatcagctgacaaaggttcacaagggcagacggcgaaagcgggagatgtttctaaagacaaatctgaaacagccggcacaggagatgcggaatcttcagagggaaactataaaacatatgcggtgcaggccggaaaattttcatcagaaaaaggagcgcaaacccttgttgaccagctgactgaaaaaggatactcggccgtctctctggctaaagaagacggatacacatacgtgatcgccgggcttgcagcggaaaaaagcctatcacagcaattgggtcagacactgatagaccatgattttgaggcttggggcggaaaagagctcagctttgcggtcgattcaggactggaagactcttttaaacaagcatctgagctctccgccaaagcgattaccggcaaagatctttcaaaaacggaagtggctgaagcggcaaaagcggcagacggtgcagacgccgctgacaaaaagcagaaagaggccgtgcttcaagcgctgaaagaactggaaacgccgggttcggaatccggctggaaagcccaaaaagagcttttaagtgttgtaaaatagtatctcatttcccgtcatccggcgggattttttattttgtcatcaaaaagttatttttctgaaattgtggttgcccgtttgatttggtaggatagacaagtatctttttttcttaagcaaaccctgaaaggatgacaatcatgacaaaacgcttaatactcgcatcacaatctccgcgaagaaaagaactccttactcttcttcagattccttacagcattattgcaagccgcacagaagaaaaattaaatcgaaacctttcgccggaagaaaacgtccaatgtttggccgagcaaaaagccggtgctgtattggccgaaaatcccgatgcagtcgttatcggggctgacacgatggtgtgcatagacggcgaatgcctcggcaaaccgcatgacagagaagaagcggcacacatgctgcggaggctttccggccgaagccatcaagtcattacggcggtcagcattcagacgcatgaccggaaagaaacgttctgtgacacgacggaagtgacgttttggccgctcagtgaagacgacatacagctctacattgaaacaaaagaaccgatggataaagcaggtgcatacggcatccaaggaaaaggcgcgcttttagtgaaaaaaatagacggtgatttttattctgtcgtcgggcttcctgtcgctaaaacaatgagagccttgaaagaatttaatataaaagcttgatgttcaaaccgggaaggggaacaaggaggggttgatcatccgtgatctgccgttaaaattaagagatttccccgaaaaagaaaaaccgagagagcggcttctgcacttcggagccgaacatctctctaacaatgaattgctcgccatcctgctgcggacgggaacgaaacatgagtccgtcatgaacctcgctcaccggctgctgcggacgtttgacgggctgcgactgttaaaaggcgcctctgcccaggagctttccagcattccgggaatcggcacggtgaaagccgttcagattcttgccgcaattgagctggggagccgcattcataagacatccgccggggagcattgcgtcatccgctctccggaagacggggcgaagtatgtgatggaggatatgcgctttttatcccaggagcattttgtctgtttatatttaaataccaaaaatcaagtcattcataaacgcaccgtttttatcggaagtctgaattcatctattgtccacccgcgggaggtgtttaaagaagctttcaaacgatccgccgcgtccttcatttgcgttcacaatcatccttcaggagatcctacaccgagcagggaagatatagaggtaacccggcggctttttgagtgcggaaatttaatcggcatcgagctgctggatcatttggtcattggtgacaaaaaatttgtgagtttaaaggaaaaaggatatttgtaacactttttttttcgttgatttaagatataatagattttatgagtttttccctttagggtatttttgctttaagaaaggaagatacatacatatgttcggaattggtacaagagaccttggtatagatttgggaaccgcgaatacgcttgtgtttgttaaaggaaaaggaatcgtagtgagagagccgtctgtcgttgctctgcaaacggatacgaagtccatcgttgcggtcggtaacgatgcgaaaaacatgatcggaagaactccgggcaacgtggttgcgctccgtccgatgaaagacggcgttatcgctgactatgaaacaactgcgacaatgatgaaatactacattaatcaggctgtgaaaaataaaggattgtttgcgagaaagccttacgttatggtgtgtgtgccgtcaggtattacggccgttgaagaacgggcggtcatcgacgcgacaagacaagcgggcgcacgtgacgcttatccgattgaagaaccgtttgcagcagcaatcggcgcgaatcttccggtatgggagccgacgggcagcatggtcgttgatatcggcggcggaacaactgaagtggcgatcatttctttaggcggcattgtcacgtctcagtcaatccgcgtagccggtgacgaaatggacgactcaatcatcagctatatcagaaaaacatataatctgatgatcggtgaccgtacggcggaagccattaaaatggaaatcggttcagcagaaaccggtgaagaaaatgcgtcaatggaaatccgcggccgcgatcttctgacaggtctgccgaaaacgatcgaaattacgggaacggaaattgcaaatgcactgcgtgatacagttctctcaatcgttgacgcggtgaagagcacgcttgaaaaaacaccgcctgagctggccgctgatattatggacagaggtattgtattaacagggggaggcgccctgctccgcaatctcgacaaagtcatcagcgacgaaacgaaaatgcctgttcttatcgctgaagatccgctggattgtgttgcgatcggcactggaaaagcactggagcacatccatcttttcaaaggaaaaacaagataatcaggagttaaatagaagaggtgtatcacgatgccgaacaaacggttaatgctattacttctgtgtattatcatattggtggctatgattggattctcgctgaagaacggccgtaataccacctggcctgaaaagctgatcggtgatacgacgggagtatttcaaaacatttttcacacgcctgccgaatattttgcagggttcttcggggacataaaagacctgaaaaacacgtacaaagaaaacgaacgcttaagacaaaagctggacggacagacacaatatgaagcgaagctccaagaactcaaagatgaaaacaagaagctgcgtgatgaactcgggcatgtcaaatcaatttccgactatgatccgattttagcgaccgttatcgccagaaaccctgatcaatggtacaagcagatcatgatcaataagggaacgaagcagaaagtggccaaagacatggctgtcacgaacgaaaagggtgcgctggtcgggaagatcaaaagcagcggactcaacagtttcacatccgccgttcagctgctgagcgatgttgaccgcaataacagagtggccaccaaaatctccggcaaaaagggaagcaaaggctacggtttaattgaagggtatgataaaaagaaacagactctgaaaatgaccatccttgagccggatgaaaaacgtgaagtgaaaaaaggcgacctcgtggagacatccggaacgggcggcgtatttcctcaagggctgacggtcggggaagtgaccgatgtagaatcagatgcttacggcctgacgaaaatcgcttacgtgaaaccggctgccgacttgtacgatcttgaccatgtcatcgtcgtgaaccgaagcgtagcaacaggggaggaaggatcgtgaaacgtttccttctccctttgattatgattttggtcttttgtgcggaaagcatctataccgatctggtgcgttttcctttcgtttccgtcgagcagcaggtcgttccgcattttcttttgcttgcgctgatttttatgtccgcttatatcaaccaaaagcatgcggtgatctacggtttgattttcggatttctttatgacatcaattatacgggtgttttaggcgtttatatgtttggttttgccggtttatgctatctggcggccaaagcgtttaaagtgctgcagacaaacgccctgatggtcattctggtcgcggtgctgagcgtatgtgtgcttgaattttacgtctacggcattcagacgttaatccgcagcggcacaatgacatttaacgattttgtcattcagaggttcttgccgaccgctttgctgaatattgcgggagccgttatattagtcctgcccttcaggctgttttatataagtctgaagaaagaattaagagatgagtaaaaaggattttatctttttttgacgaaaagagtatgttgttgaggtgaacattgatgaagaccaaaaagcagcaatatgtaacaataaaaggaacaaaaaacggcttaacattgcatctggatgatgcgtgttcttttgatgagcttctcgatggtcttcaaaacatgctgtcgattgaacaatatactgatggcaaaggccaaaaaatcagtgttcatattaaactcgggcatcggtatctgtatcaggaacaggcagagcagctgactgatctgatcgcgtcaaagaaagatttagtcgtgcattcaattgacagtgaagtcatcgccaaagaagaagcgcagcggatgaaagaggagcaggaaattgtttctgtttccaaaatcgtccgttcgggccaggtgcttcacgtgacgggagatttgcttttaatcggagatgtgaatcccggcggtacgatcagagccggaggaaatatatttgttctcggttcattaaaagggattgcccacgcgggttataacggaaataaccgggctgtgatcgccgcatcagaaatgatgccgacacaattgaggatcaatcacgtgttaaatcgctccccagaccacattcaaaaagggaacgacatggaatgtgcttatttagatactgacggaaatatggtcattgaacgccttcagcaattggctcatttaagacctgatctaacaaggcttgagggaggaatgtgaaattgggtgaggctatcgtaataacttcgggaaaaggcggagtaggtaaaacaacaacatctgcaaacctcggtaccgccttagccattttagggaagcgcgtctgtttggtggacacagatatcggactgcgcaaccttgatgtcgtaatgggtcttgaaaacagaattatttacgacttagtagatgtaattgaaggcagatgcaagacgcatcaggcgcttgtcaaagacaaacgttttgatgatctgcttcatttaatgccggctgcccagacaagcgacaagacggctgttgtccctgagcagatcaaatcgcttgtgcaggagcttaagcaggaatttgattatgtcattattgattgtccggccggaattgaacaaggctataaaaatgccgtctccggagctgataaggcgattgttgtgacgacgccggaaatatcagcggtgcgggacgctgaccgcattatcggacttttggagcaggaagatatcgaaccgccgcgccttatcgtgaaccgcatcagaaatcatctggtgaaaaacggtgacacgatggatgtggatgaagttgttcatcatctgtctattgatctcctcggaatcgttgctgacgatgatgaagtgatcagggcttcaaatatcggcgaaccgattgccatgaattccaaaaaccgcgccagcattgcgtaccgcaatatcgcccggcgcattttaggagaatccgttcctttgcaggtgcttgaagagcagcaaaaagggatgatggcgaaaatcaagtcatttttcggcgtgcgttcataatatataccagaatacaaagatctgatgaagcccagcttatcaggtcttttttgtttttcaagagcgcatatttgcaatggacaagacataggatgtacaaacccaacgattgcaaaggatgatggcgatgagtcacagagctgatgaaattagaaaaagactggccaaaagaagaaaacagtggcctgaatcaaaacggactttcgttcaaaacgcccaaacgcagaattttcccgcgtggcagacggtcaaggagcaggaaaagcacaagcttctaccggactacgaatatcaaacggaacacccgcccgaatttaacggacggcatccattgatcagtgctcattctattattttaaaatgcctgctggccgcctgtctcgtactgatctccgctattgcctataaaactgacaaacagccgctgagtcagatcaaaccggcgatcgcacaaacctttcaaaaagaatttcagtttgctgccgtaagcaattggttcgtatcttccttcggaaacccactcgcttttcttacgccgggaacgaaaaagaaggacggtcaggtggcggtcagtcaggatatggccgttcctgccgcggggaaaatccagcaggactttcaaaataacggagaaggcgtcgtcgtcgaaaccgccagcgaagccattgacagcgtaaaagaaggctacattatggaagtgagcaaagataaaaaaacaggactgacggtgaaggtgcagcacgccgacaataccagcagcatttacggccggctaaaagatgttaatgtttcattgtacgactttgtcgataaagggaaaaagatcggttcgatcaagctcaacgataaaagtaaaggccagtactatttcgcgatccaggatggcgataaattcatagatccgatccaggtgatcacatttgatgaataaatggctcatcctcctttttaaaattcatgtccatccttttctttggattatcatggggcttggtcttatgacggggcacatcaaagcgctgctgtgtcttttgctggtcgtatccgttcatgagctggggcatgctgctctggctgtgtttttttcgtggcgcattaaacgcatctttctgctccctttcggcgggacggttgaggtggaggagcacggaaaccggccgcttaaagaggaattcgcggtcattctggcgggcccgcttcagcatgtgtggcttcaggcggcagcctggctctttttcatgtcaggctttgcaagtgagcagacatttgagatgtttaccttttataatctctccattcttttcatcaatcttttgccgatctggccgcttgacggcggaaagttcgtgtttttatacttctctaaacaaatggcttttcaaaaagcgcatctcctcagcctgcagacatcggctgtttccgcgcttttgctctgctgctggattgtgctggccgtcccccttcagatcagcgcatgggtgctgttcgtctttctcgccgcttctttatgggatgaataccggaagcggcattatattcagctgaggtttcttttggagagatactacggcaaaaaccgcgatgtcgccatgctgcatcctttgacggtcgcggccgatgccaaagtaaagcatgtcatggccgaattcaaacggggatgcaagcaccccattatcgttgaaaaagccggcgaaaagctcagccagctcgatgaaaatgaagtgcttcatgcgtattttgccgataaacggacagattcctctatggaagacctgctgctgccttactagaaatagattgacatatccttttggttctgatatattttttaatgttatggatgtagcaccaatgctacaaccgctcgggacaggtgataagagctttaaagccccctgttgctggcgagtcttagtctaataggaggtgcagagaatgtacgcaatcattaaaacaggcggaaaacaaatcaaagttgaagaaggtcaaactgtttacatcgaaaaacttgctgctgaagcaggtgaaacagtgacgtttgaagacgtattgtttgttggcggagacagcgtgaaagtcggcaacccaacagttgcaggcgcgacagttacagctaaagttgaaaaacaaggccgtgcgaaaaaaatcactgttttccgttacaagccaaagaaaaatgttcataaaaaacaaggtcatcgtcagccttatactaaattgacaatcgaaaaaatcaacgcgtaagcatgattgaggcaacaattcgaagatcccggaatgacgggggcatattgtcctttgaaatgacgggacatgccgattttgctgaacatggacgagatctcgtatgcgccggggtcacggctgtcgttttcggagcggtcaatgcggttatcgcgctggctcctctcgaaccgattcttgatataggcgaggacgggggttatttctactttgaattccctgaagccgctgatcaggaagctttgcaaaaagcgcagctgctgattgaaggcatgattgtttctcttgaaacgatcgagcgggattacagtgaacacttacggttgactgcaaaccaaatataggaggtgagttacatgcttagattagatcttcagtttttcgcttctaaaaaaggtgtaggttctacaaagaacggacgtgactctgaatctaaacgtttaggcgctaaacgtgcagacggtcaattcgtaacaggcggatctatcctttaccgtcaacgcggaacgaaaatctacccaggtgaaaacgtgggccgcggaggagatgacactctttttgctaaaatcgacggaactgttaaattcgaacgtttcggccgtgaccgcaaaaaagtgagcgtatatcctgtagctcaataatgacacaaaaaactccggtcgttgactggagttttttttgcagtaagcggagtaacatcaagaatgaaaagcagaggatgcgtgagtgaaccccgccttgaatgaggacatcagcttcccatacccactggatatgttccccaagcagtgataccaaaaatgtttctgcctggcatccgcattgtatgcgatccgaaaaaggaacatgatgaaccaggaaaaacaagtgtttttttaacaaagccttctctgttataattcatagtacacacttatcaagactcctaaaaagaaattaaacgattgggagtgcgaaaatgaaggatgtatcgaagaaacaagaagaacctgtaagcgatgcggctctgatcaatgagctgatccaattaatgggccatttccgtcatgattggatgaataagctgcagctgataaaaggaaacttaagtttgcagaagtatgacagggtcgttgaaattattgacgaaatggtcatagatgcaaagcacgaatcaaagctctcaaacctgaaaaccccgcacttggcgtttgactttcttacatttaattggaagtcccgttatatgaggctcgaatacgaagtgctcggagaaattaaagatttatcggcatatgatcaaaagctgtcgaacctgatgagaaaactgtttcatctgttcggtctggcggtaaacaatgaaagtgaaaatcatctgaccgtatcgctgcagacggatcaccctgacagacagcttattgtatatctcgattttcatggaacgattgcaaatgcagatgtgtttgatgaatttcgcaaatcccggcatgaggactttgatgtcatgcaatttgagctgaccggccatgaatgtgtggccgaaattggaatgaactagcggttttttacggtttagaacggaggatattatgtttgtagatcaggtgaaagtatatgtaaaaggcggcgacggcggtaacggaatggttgcgttccgccgtgaaaaatatgtgccgaaaggcgggcctgccggcggtgacggaggtaatggaggcgacgtcgtttttgaggttgatgaaggactgcgcacgctcatggacttccggtaccagcggcatttcaaagcgatacgcggcgagcacggcatgtctaaaaaccagcacggcagaaatgcggacgatatggttgttaaagttccgcccggcacagtcgtaacggatgacgatacaaaacaggtcattgccgatctgacagagcacgggcagcgcgccgtcatcgcaaaaggcggacgcggcggacgcggaaatacccgctttgcaacaccggccaacccggcaccgcagctgtcagagcacggagagcccggaaaagagcgctatatcgtgcttgaactgaaagtgcttgcagacgtaggtctcgtcggcttcccgagcgtcggaaaatctacgcttctgtctgtcgtttcatcggcaaagccgaaaatcgccgattatcattttacaacgcttgttccgaatctgggcatggtggaaacggatgacggaagaagcttcgtcatggcggatctgcccggcctgattgaaggagcgcacgaaggagtcggcttaggccaccaatttctccgccatatcgaacggacgcgcgtcatcgttcacgtcattgacatgtcagcgatggaaggccgtgatccgtatgaggattatgtcaccattaatcaggagctcagtgaatataatctgcggctgacggagcgtccgcaaattatcgttgcgaataaaatggacatgcccgaagcggctgaaaatcttaaagcgtttaaagaaaagcttcaggatgatcaccctgtctttccgatcagcgctgtgacgagagaagggctccgcgatcttctgtttgaagtcgccaaccagctggaaacaacgcctgaattcccgctgtatgatgaagaagaactggcggaaaaccgcgtaatgtacacgatggaagatgaagaaattccatttaacattacccgtgatccggacggcgcgtttgtgctttcaggtgacagtctggaacgcctctttaaaatgactgacttctcccgtgacgaatccgtcaagcgttttgcaagacagatgcgcggtatgggcgttgatgaagcgctcagagaacgcggtgctaaagacggcgatatcatccggcttctggaatttgaatttgaatttattgattaaaaaaacggagagcttgcgttgcaggctctctgatgtaaaagggaggggtgcaggtgaaagaagagacattttatttagtgcgtgaagacgttctgcctgatgcgatgcggaaaacccttgaagtcaaaaagctgctcgacagaaaaaaggctgaatcggttgcagatgccgtgcagagagttgatttaagcagaagcgctttttacaaataccgagatgcggtttttcctttttacacgatggttaaagaacaaataatcacacttttctttcatttggaggatcggtcaggcgcgttatcccagcttttgcaggcggtggctgactcaggaagcaacgtgctttccattcaccagacgattccgcttcagggcagggcgaatgtcacgctctcaatcagtacgtccgcaatggaagaaaacattcatacgttaatgaataaactgagaaaatttgattttatagaaaaagttgagatcttagggtcaggcgcgtaaggagagaagagacatgaaagtcggttatttagggccagaagccacatttacacatctagcagtcagttcctgctttcaaaacagcgtgacacaagcaccttatcaaacaataccggcatgcatggatgcggcggttgcgggagaagttgatcttgcatttgttcctttggaaaacgcgctggaaggctcggttaacttaacgattgactatttgattcatgagcagcctcttgcgatcgtgggggaaatgacgctgccgattcaccagcatctgctcgttcacccttcgagagaaaatgagtggaaaaaacttgagaaaatttattctcattcccatgcgattgcgcaatgccacaaatttcttcaccggcatttttcgtccgttccttatgagtatgcgaagtcaacaggtgcggctgccaagtatgtcagtgagcattcggaccttccgatcggcgtgattgcaaatgaaatggccgccgctacatacggattgagcatcgtgaagcgggatattcaggattatcaggacaaccacacgagatttgtcattctttcgcctgaaaaagacgtctcattcgaagtgaatgcgaaactgtcttcacggccgaaaacgacgatgatggtaacgcttccccaagatgaccaatcaggtgcgctgcacagggtgctgtccgctttttcatggagaaacctgaatttatcaaagatcgaatcgcggccgacaaaaacgggtctcggcaactatttctttattattgatattgaacaggcgatggatcaggttctcattcccggtgccgttcaagagatggaagccctcggctgccgggtcaagcttctgggaacatatcaatcctattcgatataaaaaaagcccttcagggggcttttttttaatcttttattaaaatacccgcgtcgtccagcgcttggcaggcttggtcaatccgctcttttgtcggggcgcttaacgtatggaggtgcacgcctccggtcagctgtgaaaggtaagcggcatttgtcgagttaatgtgatccatgaattgtttgacttctttccgtgtactgactcttatggcggcggttaaatcgccgtatacggggtgttcaattatgacgtcctttatggtgacgccttcatcgacaataagtgcaagctcttcttccgtccgctccgggccgtgcagacaggcgacaatccgttcggcatttttttcgccgccggcattcatgctgatgtataagtagccttggctcgtcgcgataatcggctcgttttttgctttcaaaagcgatatgtcctgcacgatcacctgtcttgagacatttgcttttttggccaattcgcctcctgttaatggcgagccggcttctttcagccaatgaagcagcatgtcgcgtcttttctccccagtaagcttcgttccttctgtcaaattgctgattctcctttcttttgctcccatagcgccgtaaatgtatgtatcagcatatcgagctgttcacatgttgtttcgtttccgaatgagatccggaaaaactgccgcgcttcccgttcggtttttctcagcgccttcatagctgaagaagggccgtggctgccggcggaacatgcgctcccggttgagatgcaaatatcgttacgattacattctaacataatatattgtccttcaaaggagtgaaaaaaacacccgacaatgtggggcaggcattcaccgccggtttcttcctctgaaaatgaaatggggaggccttgacgccgaatttggtcatacaaataattcctcagcctgtcagcatgctcacggtgttcctccatatgtttcactgcatactccgcagcagcggtaaaagcgccgatggccggcacattcaccgtaccgggcctgaacccgttttcatgcacggtatgcggataaaccgggttccagctgacaccgggccgaatgtaaacagccccggtgcctttcgggccgtatactttatgaccggagatggaaagggcgtcgattcccgcctgatccgcatcaatcggcagtttgccgaaactttgaacacaatcgcaatgcagcaaaatgtttctctggtgaagaaaagcggccagacgattcacaggctggatgaggccggtttctgaattggcgtgctgtatggaaacgagccccgtgtcaggacggacatgagccgccagtatgtcctcggttataaggccgttttcgtcgggatatatgatggtgacatcaattccacggtcagctaaaaacgccgcggcattatggatcgaatggtgttccattgcggtcgtaataaaatgttttttgtgatcgggcaggccgtgcagcaatgattggacggccaggatgttcgcttccgttccgccgcttgtaaagtaaatgccgtctgccgctccgccgatcaatttgcctgcagaatgtctgcaatattccagcacgtccgccgctcttcctccggcgtcatgaaggctgcttgcattgccgtatacctctgtgctgagatgctgaaagactttcgcggcttctttgcttaaaggcgctcccgccgcgtaatcaagataaatcatacagcccgtctcctatccgtttatgttaaaaaaagcttgagtttattttatcgttgtgtaaatataggtgtcaagacaggtgtaaacataacaggagggtgatgtatgtctgaaaaaacaattatcgtcattggttcggggacggcggcccttgcctgtgcttcctcatttcctccgtcataccaagtgaccgtcatcacaaagagaaacgtaacgaacagcaattcgcattatgctcaaggcgggattgctgtttcatatgcaaaagatgactctatagaatcccatgtgaacgatacactgtatgcgggatgcggacacaatgacgtgacagccgtgcggcatttgctgaaaagcggacaaagcatgataaacaggctgatagaaggccatttcccttttgatacgaagtcggacggaacgttttgtctcggcagggaaggcgctcattccaaaaggagaattctgcacgccgggggagatgcgaccggacggatgttggttgagtttctggttcagcagctgagggacggcatacggatcattgaacacgagacggttgttgatctgctgattgaacacggacgatgcgcaggcgttgccgcaaaggatgcttcaggcgctgtttcttacagaagagcggattgtgtagtgcttgcatcaggcggctgcggcagtctgtaccaatatcacacaaatgattccgccataacgggagacggcatcactcttgccttccgcgcgggagctgagatcacggatatggagttcacccagttccacccgaccctccttgtgaaaaacgagactgtgtacggcctgatttctgaagcagtgaggggagaaggcggatatttagcggatcgcttcgggcgcaggatcatggctggcagacacgcgcttgaagatttggcgccccgggatgtggtttcacgggcgatttatgaagaaatgatgaaagaaaatcctgtttttataaattgcagccgaatagccgattttaagaaacgttttccgaccataacagaaatttgtcaaacagccggtgttgatcttgaaagcgggattcccgtagcacccggaatgcattttttaatgggcggagtaaaagccgatacatgggggaaaacgtccgtgcctgatttgtacgccataggcgagaccgcctgcacaggattgcacggggcgaaccgccttgcgagcaactcactgctggaagcgctggcaagcgggaaacgatgtgctgaacatatcactcaaacaccgttaaacggaagatataaaaaaaccccgaagaaatctgacgtcatcttagaagtgccggacacaacgcttcatgtgctccaagccaaaatgacaaccggagcgggcattgtcagggaaaaagaaaacctgcaggcgctggcatcctggcttaacaacgtatctgtgcgtcatataaatgtgaaggatatcacaatggaacaagccgagctatcctgcttatggaagactgcgcaacttgttgtgacctcagcccttattcgggaagaaagcaggggcgctcattttcgcgctgattttcccgggacggagaaagagtggcacggaaaacaaatcattcattcaacatctggaacagctatcagaaaaaacgaaaggattggggaactatggacattctgcagctaaaacaaatgctgactcatttttttcaggaagatatcggaacgggtgatgcgacgtcacaagcgattttttctgatcagcaatgtaaagcgcgaatcatcgcaaaaacagacggcgtgtttgccggagaagccgttatccgtgaaggatggaagcttttacacgatgatatccgcatccgctccctgaaaaaagacggagaacggatgaaaaaaggagacgtgctcgctgaaatagaaggccaggcggcggctcttcttacgggggagcgggtcattctgaatctcatacaaagaatgtcaggcattgcgacaatgacggatgaggccaaaaggcgtcttgatgatccgtccattaagctttgtgatacgagaaaaacgacacccgggctcagaatgctggaaaaatacgccgttcgggtcggaggcggctttaatcatcgcttcggcttatatgacggcatcatgattaaagataatcatattgctgcctgcggatcgataaaggcggccgtggagcgggcaagaaaaacggcggggcagatgcttgcggtggaagtcgaaattgaatccgaacagcagctgctcgaggcaatagaagcgggtgcagacgttattatgtttgacaactgtccgcctgagtccgtccggcgttttgcaggcatgacaccgggacatatcaaaacggaagcatccggaggcataacgctcggcacattgcccgcttataaaggaacgggcgtccaatatatttcactcggatttctgactcattcagtaaaaagcgccgacatcagcatggatgttgaggctgcggaacaggggaatttttaagatgtctatttttgacgtgctaactgcatcagccgaaatgatgccgagccattataaagacatgagcacaggagaaatggaaaagcgggtcgccgccattaaacgggctttcggaaagcgcctgttcattccggggcatcactatcaaaaagacgaagtaatacaattcgccgatacggcaggtgactccctgcagcttgctcaagtggcagaaaaaaataaagaggcggaatatattgtgttttgcggcgtgcattttatggcggaaaccgctgatatgctgactgatgataaccaaaccgtcattttgcccgacatgcgcgccggctgctcgatggctgatatggcagatattcagcagacggacaaagcatggcaagagcttcaagaactgtacggtaacaccatcattccgttaacatatgttaactcgacggcggaaattaaagcattcgtcggacggcacggaggagcgaccgtcacctcttcgaatgcccggagtgtgctgaaatgggcttttaaacaaaaagagagaattttatttttgccggatcagcatttaggcagaaatacggcctatgacctcggcattccgctgacagaaatggctgtatgggacccggtgcagaaccgattgcttactgaccatccggaaaacattaaggttatcctttggaaagggcattgctccgtacacgaaaagtttacagcggaaaatatttctcagctgcggcagcgggattccggcatccgcattatcgttcatccggaatgttcgcgggaagtggtctcgctcagtgacgacagcgggtctaccaaatacattattgatacgatcgaacaggctgaaccgggaagcaaatgggcgatcggcacggaaatgaatcttgttcagcgcctcattcacttgcatccggataaacagattgaatcattgaatcccgatatgtgtccgtgtcttactatgaacagaatcgacctgccgcatttattgtggtcgcttgagcagcttgaaaaaggcgagccgaagggtgtcattaaagttccggaagcggttcggacagaagcgcttcgtgctttgaacagaatgctgagtcatacgtaatcataaaaatttcccctccttcccaaattttttatcatcatgcccagtccaccggcatatagtgtgaagaaacgtattgtaatgacaaatgtaccgttcacgttttgtgcataggaggggaaaacgttgaaaattcatatcgttcaaaaaggcgattcgctctggaaaatagctgaaaaatacggagttgatcttgaagagttaaaaaaactgaatcatcagcttagcaatccagacttaattatgcctggaatgaagataaaggtgccttcagaagccgttccggtcagaaaagaacctaaggccggcttcggaacgtctgcgcataagcatgagcatccatatgccaaagaaaaaccgaaatcagttgtggacattgaagacaccataccggaagaaccaaagccgtcaattccgtatgtgccgccaatccctgaaaagcatgaaaatgtgctgccggaagctgatatgaaccaatattacccgtccaatcagctgtttcagccgtggtcgcctcctaagccggaggaaccggtgacacattttgtcgagccgaaagaaaaagagcatgacaataacattccacaacaggaggaaatgatcaacatggaaaacgcgaattacccgaatatgccaaaggcgcctgaagccggaaagatggaagaagaaaacgccgcttatcatctgccgaacatgccaaacattccgaatgtcccgtttccgaatatgccggccgttgaaccgtcttttatgcattacccgatgccgtgcatgccttgtccttgtccggttccggtgacaccgatgctgccgggttcgggactatgccatccgtgcttcccggtaggcggaggtttcggcggttttggaggaggttttggaggctttccggtaatgccgatgccgttaccgtacggattccatcatccgggatttgggccgcaagcgggttacggtgaatttgaaaaccaggcccatgaaaatgcagagcattatgatggttctgcatctggtttcggcggtgctccgtacggtcaaatgccgtattacggcggatattcgtcacattacgcaaacgcgcctcatcatgatggaaaatataaggatgatgattgcggctgccatgattcacatcatcaccaccaccatcaccacggttcacatcaccatcacgcaaatatgcctgtgcagccgtatccgaatatgggtgcaaacgccggatattttatgccttacggcggagcaaatcctagtgccgcgccgaatcagccgagtccaaatcaagtattcggacggccggaggaagaagaagattaatgtttcgggacgatgtatgtcgttcctttttttatgtccaactgaggaatggacataactgacaagcttaaatccgccgcccgccgcacatcctaaacatgagcggaaaacgctcaaaacagcgatgaatccacggggggtttttccattgggtaaaaaactgatgacgatcgcgggcgttttagccgtgacggcaagcttaacggcatgcggagcaaataatgccatgaatgacggacgctacaaccagtcaacacgtccggtcggatattattcgaatgataatggtaacggcagaggccagtacggcatggaccatcaaggacccgtttctgaaatgatggaaaaccgaaacggccgtcataatacgacaaacgtgtccgaccagtacgcgcctaatgacggggttccgttaacgacggacggcacatataacggccgaaatgtcaatacgccgccggcagcaatgtcttataatgggtatgacaacgccgaaaacatcaggttggcggcaaaagttgcaaaccgcgtgaaaaaagtaaacggcgtacaggatagtcaggtcatcgtgactgacacgagagtcgtcattgccgtcagaacaaatcatccttttacgaaaaatgatgataaacatgtcaaacatgcggccaaaaaattcgcggacggccgtacaattcaagtgtttaccgacaacgctacttttacaaagctgcaagacatgaacagaaacagccgttaaacgggactgccggatgatttcatccggcagtatttttatgaataaagcttcatcatttctttacatattcttaaaacgctctttatattgcggtgttaacataaaagtaataaaacgtaacggaggggccgggatgaaaaaaacggagcatgacaaaagccgcggagcaaaaactgtgtatctgaccgtaaggggataccggctcaaactgacgcccggacaaatgaaactgatttcagccggacgggcataatcatcgcagcagccctcatttagagagctgctttttttcggctgaaacagacaaatgaaagaaaacggttaagcaccggcatctttggtcaaactagcatcaagagtttgattgaataaagaggtgttattggtgaaacgaatttgcggtgctcgtctattgtttatgcttatcttatcggctgcagccctgatttgcggaggaaaaggcgcatacggggcggaggtcgagcattacgggccgcttcgggtgcacgtccagctggaaaaggtctatctggacggtgatgtcggcatcgaacatacggatgaaaccgttttggcgatggaggatttttgggccgcatatgcgggctggacgctcgttgagcagaaaaaaggcttcgtccttttccgtaagcatgttgatgacatttctccgctcagtaaggttaacggttatatcggcgtcacggacgggggcgtcatctccacttttcacggccgtcccggatcgctggccgagccgattcaatctttcttccagattgatatagaaagactggaaagccgattgcaaaagcacttggaacacggcataccgtacaggacaaaagcggagtttgagagcgtgatcgatcatattaagacttacagcggctgactttgacgcaagacatgtgacacatgtcttttttttctgaatggaaggtgtcaaagcgaacatacgttaacttttctataagactttggctgtttttgtgttacaatgataagcagtcaaagaggtgaataggtgtgattgaattcgtgaaggggacgattgattatgtatctccccaatacatcgtgattgaaaacggcggaatcggctatcaggtcttcactccgaatccgtttatttataaggtaagcaatcaagagaccatttttacgtatcatcatataaaagaagatgccttttctttgtacggtttttcaacccgggaagaaaaagcgcttttcacaaagctgctgaacgtcaccggcatcgggccgaaaggggcgctcgccatcctcggctccggtgatcccggagccgtcatcgaagcgatcgaacaggaagatgaagcctttttggtgaaatttccgggtgtgggcaaaaaaacggcgcggcagattattcttgatttgaaaggcaaactggccgacgtcgtgcctgaaatgattgacaacctgttcaatcatgaagcgcgcattgaaaaacaagaggctgaaacggcgcttgacgaggcgcttgaagcgctccgggttctcggctacgccgaaaaagaaattaaaaaagtgcttcctcacttaaaagaggaaacggcgctttcaacagatcaatatgtgaaaaaagcattgcaaaaattattaaagtaaggtgatgttcatggatgaacggctcgtttcaagtgaagcagacagccatgaatcaataatcgagcaaagcctcaggccgcagaatctcgcccagtatatcggccaaaagaaggtgaaagaaaatctgcgcgtgtttatcgatgcggcgaaaatgaggcaggaaacgctggaccacgttcttttatacgggcctccgggtctcgggaaaacaacgcttgcgtctatcgtggccaatgagatgggtgtggagatgcggacgacgtcaggtcccgccatcgaaagaccgggggatttggcagccattttgacggcgctcgaaccaggggatgtgctgtttatagacgaaattcacaggctgaaccgctcaattgaggaagtgctgtacccggcgatggaggatttctgccttgatattgtcattggaaaaggcccgtccgcccgctccgtccgtctcgaccttcccccttttacgcttgtaggagcgacgacaagggtcggattattgaccgcaccgctcagagaccggttcggggtgctgtcgcgccttgaatactatacgcaggaagagctgacagatatcgtgtcaagaacggctgacgtttttgaagtggatatcgaaaaagccccggctctggaaatcgccagacggtcaaggggaacgccgcgggttgcaaaccgtctgctcagaagggtgagagattttgcccaggtgctcggcgacagccgcatcacggaagaaatcgctcacgacgcgctcgaacgtcttcaagtcgatgcgctcggccttgaccatatcgaccataagctgctgatgggcatgatcgaaaaattcagcggcggtcccgtcggccttgatacgatttccgcgacaatcggcgaagaaccgcatacaatagaggatgtgtacgaaccgtatctgctgcagatcggatttcttcagaggacgccgaggggacgggtcgtgacgccggctgtgtatgaacattttcgattggaggcgcccgcccgtgactgactttccgaaggttctcatggttctcggtgccgttttgcttattgccggcgcagtctggcactttgtcggaaggctgcccggagatattttcgttaagaagggaaatgttacatttttctttcccgttgtcacttgtattgtgatcagtgtgatactatccattctgcttaattttttcggcagaatgaaataacaatagacagaattaaggtgaaatgatgaaagtcgatttatttgattttgaactgcctgaacgcctcattgcccaagtgccgcttaaagagcgtgacgcatcgcggctgatggtgctcgacaaacagacgggcgggctgacggacagttcatttaaagagattgtaagcttttttaatgaaggggattgcctcgtcttgaacaatacccgtgtgctgcctgcaagattattcggcacaaaagaagatacgggagcgaaagtggagcttctgttattaaaacaggaagaaaatgatacatgggaaacgctcgtaaagccggcgaaacgcgtaaaaaaaggaacggtcctgacatttggcgacggccggctgacagcggtctgcacggaggagcttgatcacggaggcagaaaaatagaattccggtatgacgggattttttacgaagtgcttgaatcactcggtgaaatgccgctgcctccttatattaaagagcagcttgatgataaagaacggtatcagaccgtcttttcaaaagaaatcggatctgccgcagctccgacggccggacttcattttacggaagagattctggacgagctgaagcaaaaaggtgtgcggattgaatttatcacacttcatgtgggactcggcacattccgcccggtcagtgcggatgatgtggaagagcataacatgcacgcggaattttatgaaatgacggaagaaaccgccgcctctttaaacgaggtcagaaaggcgggagggcgcattgtgtcggtcgggacgacatccacgcgcaccctggaaaccattgccggcgagcatgacggcgtatttaccgcttcaagcggctggacgtccatcttcatttatccgggatatgaatttaaggcgattgacgggatgatcaccaattttcatctgccgaaatcttcccttatcatgctcgtttctgcgcttgccggcagagagcatgttctttccgcctaccgtcatgcggtagaagaggaatatcgtttcttcagctttggcgacgccatgctgattatctaatttgaatgacaggaggcctcatacaaagtggctgaacaaccgatacgttatgaatttataaaggaatgcaaacaaacgggagcgcgactgggcagagttcatacgccccacggctcctttgagacgcctgtatttatgccggtcggcacgcttgctacggtaaagacgatgtctccggacgagctgaaatctatggatgcgggcattattttaagcaatacgtaccatttatggctccgcccgggacacgacattgtaaaagaagcgggcgggcttcataagtttatgaactgggaccgcgcgattttaacggattccggcggttttcaggtcttttcattgagcaagtttcgtaatatagaagaagaaggcgttcatttccgcaatcacttaaacggagacaagctgtttttatctccggaaaaagcgatggaaattcaaaacgccctcggctctgatatcatgatggcgtttgatgagtgtccgccgtatccggcagagtatgattacatgaaacgctctgtggaacggaccagccgctgggcggaacgctgcctggaggcgcacgggcgctcagatgagcaggggctattcggaatcgtacagggcggagaatacgaagacctgcggacacaaagtgcaaaagacttggtttcgcttgattttccggggtatgccataggcggattatctgtcggcgagccgaagcacgtcatgaaccgagtgcttgagtttacaactccgcttttaccgaaggacaagccgagatatttaatgggtgtgggttcaccggatgccttaattgacggcgccattcgcggcgtggatatgtttgactgcgtactgccgacccggattgcccgaaacggcacggtgtttacgaatgaagggcgtctgaatatgaaaaacgccaaatatgagcgtgatttccgtccgattgatgaagagtgcagctgccatacatgcaaaaattactcccgcgcttacatcagacatttgatccgctgtaatgaaacgtttggaattcgattaacaacttaccataaccttcattttctgttacacttaatggagcaggtcagacaagccatccgggaggatcgtcttggtgatttccgagaagagttctttgagcgttacggctataataagccaaatgcgaaaagcttctaaataaaaccattcttgaagggagggaaacagatgggtactttaggtacaatcgttcctattattttaatgtttgcagtgctttatttcctgctcatccgtccgcagcaaaagcagcagaaggccgtacgccagatgcaggaagagctgaaaaaaggggattcagtggtgacaatcggaggattgcacggcactgttgattcaattgatgaaagcaaggtcgtcattaaaacaggtgataacacccgtttaacatttgaccgccgcgcaatcagagaagcttccgctgaataacagcgaagctcatacatacaaaaaaagagcggagaatccgctctttttttattacgctgatctgcttcctttcaaattcactccgaaaatgccgcccagcatactgactcccaaaaagccgagatgaaacaaaagctgaccggatgtaaacgtttttccgaaccctaaatattgaaacagcaagatgattaatgaaaaacagacggcggttaacgctccgatcatccagcctttttccttcgctttgccgcccgatataaaaccgcccgcaaataaagaaagaaaagaaagcgcggtgatcagccagctgaaagatgattcttccattgaggtaaccgtcagtaaaagcgaaatcgccaaactcgtaagaagcatcaccgcaaagatagccactaagccgtacaagacgcctcttcccacttgtttcgtttcttccatttttatctcctctccgctctgcggcctgatatatgacaagccggagcctgtctttttctaaatgtattctctgaatgttcgaattagacttaaatgcatgatgttcagcccgtttcttacataattcagagccgatggcaaatgctatgaccgttggaggtgcgatatggaagatattttcattattacgtttcgtacgattgtgctttattttatcattcttgtgattttcagactgatgggaaaacgggaaatcggagaactgagcattttagaccttgtcgtctccattatgattgccgagattgccgtattggcaattgaaaatgtaaaagataagcttttgcatacgattgtgccgattgtcgttttaatgattattcaagtaagccttgcttttatttcgctcaaaagccaaaaaatacggcagctgcttgacggaaaacccaccattattataaaacagggaaaaattgatgaacgggcgatgagatcgcagcgctacaattttgacgatcttcttatgcagctgagggagaataacatcgatagaatctctgacgtgtcatatgccattttggagtcttcaggcaaactgtcgatcgtcaaaaagaaaaacaataaggataagcagatggaaacatcgcttatcgttgacggggtcattcagaacgagcatctggacagaatcgggaaagataaacactggctcgaaaaaaatttagcaaaaagaggatatcgcgatttttcggttatatcattctgcacgtttacggacggcgctttttttattgatcttaaagatgaaaaaggggagccatgaatcggtttcaccgcgtcacgaacttgccgatgaccggaatccggatcagctcttcccttttaatcagcctgaataacagaagaagcgctatatacaaaatcgcggtcattgcaatccagcctgtgagattaacagcctctgaccctgaaaaatgaacggcgtgtttgatgatgcggctgacatagccgcaaatgaatatgacggcaaaacagagcgcgtattcttttattttaatgctgatcggaagcaccttgcttacggtggccgcatgcagcagggtgacaagaaccatccccgttacaatcgcaagtgcggcgcccatgatgcccaaggaaggcctggtcgccaaaacaaaaattagaccagttttgacagcggcgccgataaaactgttcatcatggcggccccggctaaattgagagcctgcagcaccgcctgaaggggcccctgaaaatagtaaagcaaaaaaaacggcgccatcactttaacaaataccgccgcattagttgatccgtacatgacggacatcagttcatcagcgaaagagaataaaataaccaccgaaatgcctccgcttaaaagacacagccgcatcgcctgttccagacggtattcgacaacttgcagctttttttgctccattccttcactgatcgcaggaacaagtgccgttgacagagaataggttataaagctgggcagcgtcaaaaccgtcatggcaaatccggtcagctccccgtactggctggtggcggcagcggtggccactcctgcaatcgcaaggctttgcgcgacgacaataggttcaaaaaaccaagataaatttccgatgaagcggcttccggttgttgggagcgacacgctcatcagctggcggaaggtttcttttccatttgcgatcgacttgaaaaattgttttctgattctgattgttttatttgctttaaaacaaatgaataaataaataagagaggcaagctccccgatgacagacgaaatcatggctccggctgcggcatattcaatcccgtacggcagaaacaccgtcgtgcagaccgcgacaagtgaaatccgcacgatctgctcaagcacttgggaaaacgccagcgggttcatattctgccttccctgaaagtaaccgcgcagcacgctggagatcgcgataatcggcacgacgggcgtaatcgccagaagcgggtaaaccgtgcgctgatccgtcagcatcgtttcggacataatcggcgcaaagcataaaaacagcggcgtgaagatgagacttaatatcccggtgacggtaagcgacatcactaaaatatgtttcattttctgccggtccccccgcgcgcttgcttcagcgacaagtttgctgatggcaacggggaggccgaattgagtcaaagtggtggccaagaaaaatgtcggggcagccatcatgtataaaccgaccccttcttcaccgataaaccgggcgataaccacccggttgacaaagccgagcattctcgtaatcatcccggctgcgatgagaataagagtgccccttaaaaaagtctgttttgccattttataaacccctgccttctcaaactacctggaatcatatacaataaagatatgcgccgatgtcgtccgagcatgacaagtcttcgagaaaaatggaaaaaggagcgagcgcccagtggagaaacatcccgccgaaatgtacaaagatcatttgcggcctttcttgtacagtaaacttgaagagttcaaaatcctcggatacgatgatgttgagcacgagagtttatggtcatacttaatacataaaaagtggaaacagaaaaaggaactgccgctgcatgaattggccggtcatattttatcagttaaaattggcgattttatgaactatgcaaccgttgaagcttttaagtcgtctaattggctggaaagcgatgagggtcaggaagctttagatgaactgctgagataatgatttgacggcataggtttaaggaggaaatacataatgaaaaaaggacgcttgattgcgtttttcctgatcgtattattgatcggcacagggctggggtattttacaaaaccggctgccaataatattacgttaggattggatttacgcggcgggtttgaagttctgtacgatgtgcagcccgtcaaaaaaggcgataaaatcacaaaagacgtgctcgtcagcacggtgcaggcgctgaaccgccgggctaacgttctcggcgtaagcgagccgaatattcagattgaaggaaataaccgcatccgcgtacagctggcgggcgtcacgaatcagaacagggcgcgcgaaattctgtcaacggaagcgcagctctcgttcagggatacgaatgataaagagttgttaaacggctctgatctcgtggaaaacggcgcgaagcaaacctttgatccgacgacgaacgaaccgattgtcagcgttaagctgaaggatgcggataagttcggcgaagtgacgaaaaaagtcaagaaaatggcgcctaataatcagcttgtgatctggcttgattaccaaaaaggcgattcttttaaaaaagaagtcggcaaaaaacatccgaaatatgtatccgctccgaatgtgagccaggaattaaacacgaaggatgtcacaattgaaggccagtttaccgttcaaaaagcgaaggacttggccaatattttaaacgcgggcgcgctgcctgtgaaactgaccgaaaaatactctacttcagtaggggcgcaattcggacagcaggctttgcatgatacggtagaggccggcatcatcggtattgcaattgttttcttatttatgctgctttattacagactgcctggactcatagcggtaattacgctttctgtatacgtgtatattacgcttcaagtgtttgactggatgcaggcggtgctgacgcttccgggtattgcggcgctcattttgggtgtcgggatggcggttgacgccaacatcatcacctatgaacggataaaagaagaattgaaactcggcaaatccgtccgctcagctttccgttcagggaacagacgttcattcgcgacgattttcgatgcgaacattacaacgatcatcgcagcggtcgtgctctttattttcgggacaagctctgtaaaagggtttgcgacgatgctgattttgtcaattctgacaagctttattacagctgtcttcctttcaagattcctgctctcccttctcgtggaaagcagatggcttgaccggaaaaaaggctggttcggcgtcaagaaaaaacacattatggatattcagaagaccgacgaaaatactgaaccgcatacggcattccaaaaatgggatttcacgagcaagcgaaaatatttctttattttctcaagcgctgtaaccattgcgggaattatcatcttactggtctttaaactcaacctgggaatcgattttgcaagcggcgcgcggattgacgtgcagagcaatcatgcattgacggcgcatcaggttgaaaaagattttgactctctcggcatggaaccggaaaacatcgtgctttctggtaaagagaaccatgttgccgcggcccggtttgtcggagagccatctaaagaaaaaatcgctgaaatcaaaacgtactttaaggacaaatacggatctgaaccgaacgtcagcacggtatcgccgacagtcggaaaagaactggcccgtaatgctttatatgctgtcgccattgcatcaatcggcatcattatttacgtgtcaatccgtttcgagtacagaatggctatcgccgcaattgtatccctgctgtacgacgctttctttatcgtcgcgtttttcagcattacaaggctggaggtcgatgtcacctttatcgccgctattctcaccataatcggttactcgataaatgatacgatcgttacatttgaccggatacgtgagcagatgaaaaaacgcaagccgaagtcatttgccgatctggaacatatcgtgaatctgagcttgcagcaaacctttacacgttcgatcaatacggtcttgaccgttgtgattgttgtcgtcgtgctgctcattttgggctcatcgtcaattacaaacttctccgtcgccttattggtcggtttattgacgggcgtttattcctctctttacatcgccgcgcagctgtggcttgtatggaaaggtaaagaatttaaagggaaaaaatcaatcgaagagtaaaatgggaacaggctgtcttccggaaggcagcctgtttttttaggccgcattgaacttaaaacctgcatttgctataatgacatacgcttacataatcaatcatcattgtaaaaacatgtaggagggttcttatgaacgttcgtgagtcggagcttccgggcatcggccagaaagtagaagtcattacgaaaaatcacgataaaatcagtattattcttcatgatgacggcagaaaagagctctattacttcgatgagaatgatcatgacgaatgcttggcatccgttgaatttaacgacgaagaggcgaggcagatttccgctattttaggcgggatgacgtataagccgaaagcgctggaatctgtggaagttgcgcttgatgacctcgtcattgagtggtttaaagccgaatctcatgcaccggctgtcagccgtacaatcggagatttggagatcaagaaacattacaacgtccagattattgcgatcataaagaaaaaccggcaaaaacagctgagccccggcattgataccgtaattgaagaaggggacaccctcgtcatatcgggagaaagaagcggactgaaaaagctggtccgcgagcaattaacggcccggatttcctgagaccggggtttactcccggggaaatgggggaaaagataagaatgaacaattgggggcagacgcatgaataaacaatggactattatattcgctttactatttactttgattgtcgccatctttgctgtcattaacgtgcgggcggttgaggttgattatctgttcggaaccgctgaatggccgctgattttagtcattttaggctctgtgttaatgggagcgctgatcgtgttttcagccggtatctttcaagtgatgaagctgaagcgccaaattaaaatgctgcggaaagaaaacagatccgcaggtgaattgacggctgattcggacggccaaaaaacagccgcgccgccggaagaaatgcttgaagagaaaaaaggatcagaataacatttgaaacccctcagtccgctctagtataatagggtggttgaggggtgaatttatgttagcgtcaaaaatgcgctgggaaatccagcagccggatcaggaaaaagtcaaatcactcacagaacaattggacataacacctcttgtggcatcactgcttgtaaaaagaggttttgatactgccgaaagcgcaaggctgtttttacatacaaaggatgcagacttttatgacccgtatgaattaaagggaatgcgggaagcagttgatcggataaaactggcggtttctcaaggggaaccgattatgatttacggagattacgatgcagacggcgttacaagcacgtcagtgatgctgacggcactcagacagctgtcggcggacgttgacttttatattcccgaccgtttcacagaaggctacggcccgaatgaacaagcttttcgctccataaaagagcggggattttcgctgatcattacagtggatacgggaatcgccgccgtccatgaagctgaagtcgcaaaagagctgggcttagacgtcattattaccgaccaccatgagccgggacccgagcttcctgacgtatttgcgatcatccacccgaagcagccgggatgcggctatccgtttaaagaattggccggcgtcggtgtggcgtttaagcttgcccacgcgcttacgggttctttgccggaagctatgctggacttggcggcaatcggtacggttgcagatctggtgcctcttcatgatgaaaacagattaattgcgtcactcggaatcgaaaggcttcggacgacaaatcggccgggcctcaaagccctgattaagctttccggcggagatatcggacaagctgatgaggaaacgatcggatttcaggtcgcgccgaggctcaatgcagtcggaagaatagaacaggccgatcccgccgtccatctgctgatgaccgaagatcagtttgaagcggaggaactggcttcggatattgaccggctgaataaagagcggcagaaaatggtgaaaaccatgaccgaagaggctgttgaaatggttcagcagcaaggcggaaacccgtctgccattgtagtggcaaaagccggctggaatccgggagtcgtcggtattgtcgcatcgaagctggctgaacgtttttaccgtcccgctgttgtgcttgggatagatgaggagcagggaatcgctaaagggtcggcgcgaagcatcagaggcttcaacctgtttacgagcctttcacagtgcagagacattcttcctcatttcggcgggcatccgatggcggcaggaatgacgttgaaggctgaagatgtggcggaattaagggacaggctgaatcaaatggctaaagaaacccttacggaagaggattttattcccgttcaggaggttgatcttgtgtgcggcgttgaagacataaccgttgaaagcattacagaattaaatatgctgtcgccgttcggcatgcttaaccctaaaccgcatgtgatggtgaaaaatgccgtacttgatgatgtgcgcctgatcggagcgaataaaaaccacgtgaaaatgacggtgaaaagtgattccgccgtccttgactgcgtcggctttaacaaaggagagcttgaagccggaattgtccccggatcaacgatttccattgtcggcgagatgtccattaatgaatggaacaacagaaagaagccccagctgatgattaaagacgctgcggtgccggaatggcagctttttgatatcaggggcaagcggacgtgggaagacacggtcaccgcgctgccgaaggaaaaacgggtgctcatcagctttaacgaaaaaaccgctcagaagctccgtgcaaaagagctgtcaggcgagctggccgggatcacatcggaatccgaggcggaagctctccagcttgacggaaaatatgccgtttttctggatgtgccgccgtcagcggatcgcctgcagcatttgcttgacggaaagaagccggaacggatttattttgtttttatcaatcatgaagaacatttcctgtcctcatttccatcgcggaatgatttcaagtggttttacgcatttctcttgaaaaggggcgcttttgacttcggcaagcatggttcagagcttgcgagacacagaggatggtcaattgacacaatcaatttcatgacaaaggtgttttttgatctcggttttgttaaaatagaagatggtgtgctgtctgtcgtgagcggcgcgaaaaaacgcgacctggcagattcgcaaacctatcaggtaaaacagcagctgatggaattagaccagaagctcaattattccgcagcccatgagctgaaggaatggctgaataagctgatgaaccaaggttcagaagcttatgaaagtacgaggaggacatagaacagatggatcttaaaaaatacgtaacaattgtgcccgattacccgaaagaaggcgtacaatttaaagatattacgacattgatggacaaaggcgacgtatatcgttacgccactgaccaaattgttgaatatgcaaaagaaaaagaaattgatttagttgtcgggcctgaagcgcgcggctttattatcggctgtccggttgcatacgctctcggagtgggctttgcgccggttcggaaagaaggaaaacttccgcgtgaggtcattaaagtcgattacggtttggagtacggaaaagacgtactgacgattcataaagatgcgattctgccgggacagcgcgtgctgattactgatgacttgcttgcaacaggcggcacgatcgaagcaacgattaagctggtcgaagaactgggcggcgtcgtagccggtattgcgttcttaatcgagctgtcttaccttgacggcagagacaagcttgacgattacgatattttaacattaatgaaatattaaccgcatatggaaaaaagcactcgtgtcagggtgcttttttcctattatttcatcatcctgacagattctttaggtgttttgaacttctgccctttacatctctcgtttttttcttgataataaactaatacagtttacatttaaaaaaggtgattccatggcgaacgaacaagtattgactgccgagcaagtaatagataaagcgcgcacttatctgccggaggagcagattgcgtttgttgagaaagcttacctgtatgcgcaaaacgcgcatcgcgaacagtaccgcaaatcaggtgagccgtacatcattcatccgattcaggtggcgggcattctcgtcgatctggaaatggacccttccacaattgcgggcggatttctgcatgacgtggtagaggacacggatgtcaccctcgacgacctgaaggaagcattttctgaagaagtggcgatgcttgtcgacggcgtgacgaagctcggtaaaattaagtataaatctcaagaggagcagcaggcggaaaaccatcgaaaaatgtttgtcgctatggctcaggatatcagagtcatattgatcaagctggcggatcgccttcacaatatgcggacgttaaagcatcttccgcaggaaaagcagcggagaatttcaaatgagacgctggaaattttcgctccgctggcccatcggctcgggatttctaaaatcaaatgggagctggaagacaccgctctccgttatttgaatcctcagcaatattacagaatcgtcaacctcatgaagaaaaagcgcgcggaacgcgaactttatgtcgaagaggttgtcaatgaagtgaaaaaacgcgtcgaagaagtgaatatcaaagcggacttttcaggacgtccgaagcacatctacagcatttaccgcaagatggcgctgcaaaataaacagttcaatgaaatatatgatctgctcgccgtccgtattcttgtcggaagcattaaagactgctacgccgtcctcggcattattcatacgtgctggaagccgatgccgggcagattcaaagattatattgcgatgcctaagccgaatatgtatcagtccctgcatacgaccgtaatcgggcctaaaggcgatccgctggaagtgcagatcagaacatttgagatgcatgagatcgctgaatacggggtggccgcacactgggcatataaagaaggcaaggctgcaaacgaagaagcgacatttgagaaaaaactgtcctggttccgtgaaattctggaattccaaaacgagtctaccgatgcggaagaatttatggaatcgctgaaaatcgatctgttttctgacatggtatacgtatttacgccaaaaggcgatgtcattgaactgccgtcaggctctgtgccgattgatttttcctacaggatccactcggagatcggcaacaaaacaatcggggcgaaagtgaacggaaaaatggtgacgcttgaccataagctccggacgggcgacatcgtcgagattctgacgtccaagcattcatacggtccgagtcaagactgggtcaaactggcgcagacgtcccaggcgaaacacaaaatccgccaattctttaagaaacagcgccgtgaagaaaacgtcgaaaaaggccgtgagcttgtcgagaaagaaattaaaaatcttgattttgaagtgaaagatgttttaacactcgaaaatcttcaaaaagttgccgacaagttcaatttctcaaatgaagaggatatgtacgcggcggtcgggtataacggcattaccgctcttcaggtggccaacaggctcaccgaaaaagaacggaagctgcgtgaccaggaagagcaggaaaaaatcgttcaggaagtcacttccgagccgaaacattatccgcaagggagaaaacgggaagcgggtgtgcgcgtaaaaggcattgacaaccttctcgtccgcttgtcgaaatgctgcaacccggtgcctggcgaccatattgtcggttttattacaaaagggcgcggtgtatccgttcaccgggatgactgtccgaacgtcaaaacgaatgaagcgcaggaacgtctgatccccgttgaatgggagcatgaatcacaggttcaaagacgcaaagaatataacgttgagattgagattttgggatatgaccgtctcggacttttaaatgaggtgctccaagccgtaaatgaaacgaaaaccaacatctcctctgtctccggcaaatccgaccgcaataaagtcgctacgattcatatggcgatttttattcaaaacatcaatcatctgcataaagtggtcgagcggattaagcagatcagagacatctattcagtccgccgggtaatgaactaaaaggagcgcttgctatgaaattagttgttcagcgtgtaacagaagcgagtgtgacggttgacggcgctgttgccggccggatcggacccggcattatggcgcttgtcggcatcactcatgaagatacagaagaagatgccgcttacttggcggataaaatcgtgaatcttcggatttttgatgatgaaagcggcaagatgaatttatcgcttttggatacgggcggggagattttatccgtttcacagtttacgctttacggcgaaacgaagaaagggagacgcccgaattttatgaatgcggctaaaccggatcaggctgtgctcctttatgaaaagtggaacgaactccttcgggaaaaaggagtcaaagtggaaaccggaatattcggagccatgatggatgttcagctgacgaattccgggccgattacattgattatggattctaaacaataaaaaagctgccgttcggcagcttttttttatgattgaaaataatgttccaatccgctttcaattccgtctgtcactttttcctgatacgagccgctatgtatgattgtttcttcttgcggttgactgagatagccgagctcatacagcatggcaggccgtttattttccctcaggacgtaataatcgccaaacagaacgccgcgatccgggataggggaacgcttcactacttcagaatggacgtctgaggcaagctggcgatccttagacggactgtaataataagccgtgcttccccgtgttgacgtatcggcatagctgtcatagtgaatgctgataaaggcatccgcattccggtaatgagaggttgaaaccctagcctgcaggctgataaaagtatcatcctgtctggtgatatacacgtttgcaccggccgcccgcaatttttgggccagcagcttagcggttttaatggttacgtttttctcaaactttccggagtagccgatcgttccgctgtcttttcctccgtgtccgggatcaacgacgatcgttttgtttttaagtgagccgctgccgcctgacgtgtcgggagaaggtgcttcacctgtttcctcaccgctttttgacgtttgtacgacccagtttgccacatatgcggtttgtccgttttcaagccggacttcataccatttgccgcttgagccgacaatcgggtaggctgcgcctttatctgctctttttacgatagaagcggaagtcgaggccgagctccttaagttggtgccgccgtaaacaatatacgcttttttcgaggagcctgagcccgcagaaccgtcccccgagccggatgcgctgtccgatgagtcagaatcctttatgatgtagtggcttgctgcccagcctttttgcccgtttgcttcaattttcagccagccgtggtcttcacttaagatggaaacctttgttccgcgtgataatttagtcataatcgctgaatcatgtgacgctgcacttctgacattcaatgaagaaacgccgacagtcccgttttttgacccgcttcgggcggaagtggctttcgtatccgatccgccgctgtccgcggtgacgtattcggaagaaacccatccggttgtgccttgataagaaatgttcacccatccgctgttcttgtccagcacggatgcatgtgcgccttgcggaagtttgccgatgacttcatatgatgtccccgggccttttctgatgcggaggtcaggatcggtggaagtgaccgttccgcttgttgcggatgaatggtctgctcctccggctgtttttgatatcagccaggaaacgacccatccggttttaccggggctcagctgaagctgcacccagtctccctcttctttagcgatcgggtatctttcccctttttttacttcagccttaattccatagctcaggccgggaccgcctctgacattgatcttgtctgtcgcgatgaccgcttctccctctgcggcgattgcggtgtggaatgacggaagaagcgctgtgatgatgacgccgcataaaataagagcaagagttctcttcttcatggctgtcctcctttctgaactaactaaaatacattcttgtataatatcgtattttccttgctgaatgttaaataaaaataaaatggtttgtttatactagtcataaatacagcgaaaaggtgtgcaaatcatgaaatatcaaccaaaaatgggacgcgcgctgcacgatgcggaaggaaatctgcacttcagtgatcagagcgatagagaaaaggcgggttttcttgaagagacggcgacggagttcggtcttttatcgaaagatgcggtcgcaaggaaaaacagacggaataaaacttgacaggggagtgcaatcccattattataatagaaattgatgtacataagtcatgataacgattttgaaccgataatggagaagagtaggtcagaatgcatggagaagagaggaaccgtcccgggctgaaagcggatccgcactgcatctttctcgaaacaacactccggaggttccctgctgaacgcttttgcaagtcattaggcagcggacgtgaacctgcgttaaaggtcagagcggggatgcttcggcattccaactagggtggcaccacgggtataactctcgtccctactatacatgtatagtaggagcgggagtttttttatttgaagaaagacattaaggaggcctgtaacatggcatatcacattccaagaggcacacaggacatactgccgggtgaatcagacagatggcagttcgtcgaacaaattatgagggagacgtgccgcacttatcaatataaagaaatccgcacgccgatcttcgaacatacggaattgttcgcaagaggcgtcggtgagtctacagatatcgtgcagaaagaaatgtacacgtttgaagaccgtaaagggagaagcctgacgcttcggccggaaggaacggccgccgcagtccgcgcgttcaatgaaaataaattatttgcgaacccggtgcagccgacgaagctttattatgtcggaccgatgttccgttacgaacgtccgcagacggggcgtttccgccaattctatcaattcggaattgaagcgatcggctccaaagatccggccgtggatgcagaagtcattgcgcttgcgatgagtatttaccgtaaagccggtttgaaacatgtcaagcttgtgctgaacagccttggtgaccaggagagccgcaaatcctaccgggaagcgctcgtcaaacattttgaaccgcgcatcgcagagttttgctcagactgccagtcgcgcctgcacacaaacccgctcagaattcttgactgcaagaaagacagagagcatgaactgatgaaaacggctccgtccattcttgattacttaaatgaagaatcagccgcttattttgagaaagtaaaacaatacttaaacgatctcggcatcccgttcgaaatagatccgaaccttgtcagagggcttgattattataaccataccgcttttgaaattatgagcaatgccgaaggattcggagcgattacaacccttgccggcgggggccgctatgacgggcttgttgaacagatcggcggacctgaagcgccgggtatcggatttgcgatgagcatcgaacgtctgctggcagccattgacgctgagaaaacagagcttcccgtcaatcaggggattgactgctacatcgtgacgctcggagaaaaagcgaaggattattccgtttccctcgtgtacaaactgagagaagcgggcatctcaagtgaaatcgattatgaaaataaaaagatgaagggccaatttaaaacagctgaccgtctcggcgcacgttttattgcgattttaggggaagatgagcttgcccaaaataaaatcaatgtaaaagatgcggaaacaggagagcagcgtgaagtggtgttagacgagctgatacaagtgttaaaggcagatcaaaagcagtgaaggagaggaacgctatgtttggaagaacatattattgtggcgagataactgaaaaagcgattggcgaaaccgtcaaactgaaagggtgggtgcagaagcggcgcgatctcggcggcttgattttcattgatttgcgcgaccgctcgggtattgtgcaagtcgtgttcaaccctgacgtatcgaaggaagcccttgccgcagcggaagcaatcagaaacgaatatgtgcttgatatcgaaggcacggtttctgcccgtgaagaaggcacggtgaatcccaacctgaaaaccggtaaaattgaaatcaaagctgaagcggtgacggtgctcagtacggcgaaaacgcctccgtttccgatcagtgaccaggcggctgaggtttctgaagacgtccggttaaaacaccgctatttggatttgcgccgcccggcgatgtttcaaacattgcaaatgcgccaccaagtcacaaaatccatccgccatttcttggatgaaaacggatttcttgatattgaaacaccgattttaacaaaaagctctcccgaaggcgcccgtgattacttagtgccgagccgggtgcatgaaggggaattttacgcccttccgcaatcgccgcagatttttaaacagcttctgatggtgtcgggctttgaacggtattatcaagtggcccgctgcttccgcgatgaagacttgcgtgccgaccgccagccggaatttacgcagattgatatcgaaatgtcctttatgagtcaagaggacatcatggctctggcggaagagatgatggcgaaagtcatgcttgaaacaaaaggtgttgaagtaccgcttccgcttccgcgaatgacatatgaagaagcgatgaacagctacggttccgacaagcctgacacccgcttcggcatgctgctgacggacgtgtcagacatagtgaaagatactgaatttaaggtgttctcatcagccgtggcaaacggcggcgttgtaaaagcgatcaatgtcaaaggcgctgccggcgactattccagaaaagatatcgatgcgctcggcgtttttgccggaaattacggcgcgaaaggtctcgcctgggtgaaagttgaagccgacggcgtaaaaggcccgattgcgaaattctttgatgaagagaagcaggcaaaactggctgaagcgcttgatgcttctgaaggcgatctgctcctgttcggcgctgataagtttgaggttgtggcccaatccctcggcgcgcttcgcttaaagctcggcaaagaacgcggcctgattgacgaaagcctcttcaacttcctgtgggttgtggactggccgttactggagcatgacgaggaggaaggccgtttctatgcggctcaccatccgtttacaatgcctgtccgtgaagatcttgacctgattgaaacggcgcctgaagatatgaaagcgcaggcttacgaccttgtcttaaacggctatgaactcggcggaggctcaatccgtatttttgaaaaagacgttcaggaaaaaatgttcgggcttctcggctttacaaaagaagaagcggaggaggagttcggataccttcttgaagcctttgaatacggcgcccctccgcacggcggaatcgcgctcggcttagaccggttggttatgcttcttgcaggccgcacaaacttaagagatacgatcgctttcccgaaaacggcaagcgcaagctgccttcttacggaagcgcccggcgaagtgagcgacgcccagcttgaagaacttcacctttctgtcaaaagaaaagtgaaacagtaaagatcagcagtttgtttcttgaaaatcaaaatctgctgtgatatgattttgacaagttaaataaagtcctgatgtgttagttgtacacctagttttgaccgaacatttttttgatttgggagcccgtatttttaaatggcgtacatgcctcttttcattcgttaagaggacttacaagatttaaaaaagggcacccacctgctgagagcgggttcaaaacgaaggaaagctgcaacggcacaattgggactttattttttgtgcgctaaaaccagcggctttttgacaagccgagtttataaaaccagaatgtggagtgaggttcttgttacatcagttttccagaaatgagctagcgattggaaaagaagggctggacacgttaaaaaacagcacggtggccgttctcggcgtcggcggagtcggttcattcgcagccgaagcattggcgaggtccggagtggggcggatcgtgcttgtcgataaagatgatgttgacattacaaacgtaaaccgccagctgcatgcgctcttgtcgacggtgggacagccgaaaacagacttgatgaaagcgcggatcgcggatattaatccggattgcgatgtcgtcgccttaaaaatgttttatacggaagagacgtatgagcagttctttgagcatccgctcgattacgtcattgacgcgtcggatacgattcattataaaattcatctgatgaaagaatgtctgaaacggaatgttccgctgatttcaagcatgggagcggcgaataaaacagacccgacacgctttcagattgctgatatttcaaaaacccataccgatccgattgccaaagtcgtccgcacaaggcttcgcaaagagggcattaaaaaaggcgtacaggtcattttttctgatgaaagcccgatcgtcatccgtgaagacgtcagaaaagaagtcgggaatgatgaagcgaaaatccgcaaagcgcaaatgccgccgtcttccaacgcctgggttccgtcagtggccggtctgattatgggcggacatgttgttatggagctcttaaaggacatcgacattaaacgggttaaagataaataaaaagaaaaacagccttcttcaggaaaggctgtttttttatttgaatccgccgtttacacgaaagattttggccggtatcaaaaaagacaagaacacatagggtgtccttgtccggttattttttctgcttcatcagtttttcatacacttgctttatggcggcttcaaatttccccgtttgtttcggtttatagtattgcttgttttttaacggatcaggtaaatattgctgttcgacccatccgttctcgaaatcatgaggatattgatatccgatcccgcgtccgagctcttgggcccctttatagtgggcgtcttttaaatgtttcggcacatcgccgattttacccgtcctgatgtctttgagcgcctcatcaacggctgagatggcggagtttgattttggcgagaggcataattcgattaccgcattggccagcggaattctcgcttccggaaagccgatccgttctgcggtctgaatcgcgctcagcacccgggggcctgcctgcgggcttgcgaggccgatatcttcataggcgatcacgagaagccttcttgatatgctttcaaggtcgccggcttcgatcagacgggccagataatgaagggcggcgtttgcgtccgagcctcggatcgatttttggaaggcagataagacgtcataatgcgcatcgccgtttttatcatgagtatagctttttttctgcagacattcttccgccgtctcccgtgtaatccggatcgtgccgtcgcttgattcctttgtggagagtacggcaagctcaagtgcgttcaaagcggagcggacgtctcctccgcacccttgcgcgaaatgatccatcgcgtcgtcgtccaccgaaacgctgtaggaaccgagcccccggtgttcatctgtgagcgctctttccaatgcctgcttgatcagatcgggtgttaacggttcaagctcaaatatctgggtccggcttctgatggccgggttaatggcatgataagggttggcggtcgtcgcgccgattaaaataatcatgccgttttctaaatagggcagcagaaaatcctgctttcccttatcaagcctgtgcacttcgtcaaggattaaaatgacctggcctgacattttcgcttcctgtacgacaatctccatgtcttttttattatgaatgacggcattcaatttcctgaatgcgatgcttgtcgatcctgcgatcgctgtggcgatggacgtttttccgatgcccggcggtccgtacaggatcatggatgataagtgctttgcacgcaccattctgccgatgattttatcttctttgaccaaatgttcctggccgataatgtcttcgatattggcaggccgcatccgatacgccaatggtttcatgaacatctctccttacatatacagggtaacggaaaacggacgattagaaaagcgaattgcggcgggccccgtgtttcaatgaaaattaggataagttatgttataataacagttggtctataagatactaaacagattattcatatccatttacttgtataaattaacaattagaattgactggggtgttcatattgaaaatatcgacaaagggaagatacgggctcaccattatgattgaattggcgaaaaagcacggagacggtccgacgtcgctcaaaagcatcgcccaaacaaacagcctttctgagcattacttggaacagcttgtatcaccgctgagaaacgccggactcgtaaaaagcatcagaggcgcttacgggggttacgtgctcgggggccagcctgaagagataacggccggagatattatcagagtgctggaagggccgatcagcccggtagaagtgcttgaggatgaagagcctgccaagcgggagttatggatccgcatccgcgacgctgtaaaagacgtgctggacagcacgacgttagaagaccttgcgagctacacggacggcgagcaggaagcttatatgttctatatttaaaccagaggtgtacagacaatggaacggatttatttagatcacgccgcgacttccccgatggatgagcgtgtgctcgaagagatgaagccccatttcttcggcagtttcggcaacccgtcaagcattcattcattcgggagagaatcccggaaatgggtcgatgaagcgagaacggacatcgcgcgcgaaatcagtgcgaaagaacaggaaattattttcacaagcggcggcacggaggctgataatttagcgattttcggaacggctgccgcccggaagaatgaaggaaagcatatcattacgaccgctattgagcatcatgctgtattgcacgcctgcgaaaagctggaagaagacggctttgaggtgacatacctcatccccggcccttcaggacggatcagtgcaaatcaggtgaaagaagcgctccgtgatgatacaatccttgttaccgtcatgtatggcaataacgaagtcggtaccattcagccgattgacgaaatcggagagctgttaagcgggcatcaggcctattttcacacagatgccgtccaggcattcggttatatgccgattgacgtgaaaaaaagcagaattgacatgctgtctgtttccggtcacaagcttaacgggcctaaagggacaggctttttatatgtaaatcaagaggtgaagctgtcaccgattcttctagggggagagcaggaacgaaagcgccgcgcggggacggaaaatgtaccgggcatcgccggcttaaaagaagcggtcgtcctttcaaaccgtgagagggaagagaaaacagcgaagtataaggagtttaagaacattatcatgagcacgctggaaaaatccggcgtcacagcggaggtgaacggagatgccgagaaatgcctgcctcatattttaaacctttactttcccggtgtgccggtggaagcgctgctggtcaatcttgacatggaaggcattgccgtctccagcggatctgcttgtacggcaggatccgttcttccgtcccatgtgcttacggccatgttcggaagtgagagcggcaggctgacttcgtcaatccgcctcagcttcggcctcggcaatacggcggaacaaatcgaaacagccgccgaaaagcttgccgccgtcgttaaacggcttgcttaaaacggcggacttacgtttttaatggagtgaatgcaaatggaaaaacggccggaggatacaagagtcgtagtcggcatgtccggcggcgtggactcttccgtggcggcccttctgctgaaggagcagggctacgatgtaatcggaatctttatgaaaaactgggatgatacggacgaaaacggtttttgcacggcgacggaagattatgaagacgtcatccgggtctgcaaccagatcggaattccgtattatgccgtcaattttgagaagcaatattgggaaaaggtatttcaatatttccttgatgaatataaagccggaagaacccccaatccggatgtcatgtgcaataaagaaattaagtttaaggctttcttggatcatgctctgtcactcggcgcggattatcttgcgacgggccattacgcccgcgtggacagaagcgcaggtacagtgcgcatgctccgcggtctggatgaaaacaaggaccagacttattttctgaatcagctcaatcaggaacagctcagcaaagtcatgttcccgatcggtgatctgcaaaaaagccgcgtgcgggaaatcgccaaagaagcggaacttgcgacagctgcgaaaaaagacagcacgggaatctgctttatcggcgaacgcaacttcaaaacgtttctcagccaatatctccccgctcagccgggcgatatgatgacaatggacggagaagtaaaagggcgtcatgacggtctgatgtattatacaatcggacagcgccacggtcttggaatcggcggaagcggcgagccgtggttcgccgtcggtaaagatcttgaaaaaaacattctgtatgttgatcaaggattccataatccgcttctgtattctgataagatcacggcgacaaatgtcagctggacgcgtcccggtctgatggacggcggcgaaatgacatgcacggcgaaattccgctaccgtcaggaagatcacaaagtaacggtgaaaatgacgggtgatgatgaagcggaagtcatttttgacgggcaggtacgcgccgttacgccgggacaagccgtcgttttttatgacggagaagagtgcctcggcggcggaacgatagatgacgtttataaagacggaacaaaactgtggtacgtataataacatgtaaaaaacctcaactcgcatgttggggttttttagcgaaaggaagttaaaaatggattataataaaatcgggattgacgccatgcaggagggcgattttgaaaaagcggcggaggcttttacgaaagcgattgaggaaaacgggcaagatccggtgccgtatatcaacttcgcaaatctgctttcttctgtgaacgaactcgaacgggcgcttgcattctataacagagcgctcgaattggacaattcggcggcagccgcttattacggtgcgggaaacgtatatgtgatgaaagaatcgttttccgaagcgaaggatatgtttgaaaaagcgcttcgctccggaatggaaaacggagatttgttttatatgctggggaccgttctcgttaaattagagcagccgaagcttgcactgccatatttgcagcgtgccgttgaattaaatgaaaatgacacggaagcacgcttccagttcggaatgtgcctcgcaaacgaagaaatgctggatgaagctctggcgcagtttgagacggtgatcgagcaggacccaagccacgcggacgcattttataatgccggggtcgcttacgcgtacaaagaaaatcgtgaaaaggcgcttgagatgctggaaggcgcaatcggcatacagcctgatcatatgcttgcgcttcatgcgaaacagcttatcacccagtcataacaaaaggagggaaggctcgtggatcagctgaacatcgaagaacagccgtatgtaaaaggcgtcattcatacggtcatttatcacaatgacaccaacctgtatacagtgctgaaagtcaaggttgcagaaacgtctgaggcgatcgaagacaaggtcgtatccgtaacgggctacttccctctgctgcaagaagatgagacctacacattttacggaaaaaccgccacgcatcctaagttcggcctgcaatttcaggctgagcactttaaaaaagaaattccgaccacaaaagaagggatcattcactatttatcaagtgatctgtttgaaggaatcggaaaaaaaacggcggaagaaatcgtcaaaaagctcggagacggcgcgctcaataaaattctgacggatgcgtcggtgctttacgatgtgccgaaaatgtcgaaaaagaaagcggataagcttgccggagagctgcagcggcatcaggggcttgagcagattatgatctctctgaaccaatacggtttcgggccccagctatccatgaaaatatatcaggcctacgaaacggaaacactggagaaaattcaggaaaatccttatcagcttgtaaaagacgttgaaggcatcggctttgtgaaagctgacgagctgggcggaaaaatgggtctgtcaggaaaccacccggagcggatcaaagcggctatcttatatacaattgaatcgacctgtctttcagagggccatacgtacatagaaacaaagcagctgataatcaatacgcaaacgctcctgaatcagtcagctgaaggcggcctcgtcacggaaatggatgcggctgacggcatcatcgccctcggagagagtaaggatatcgtcatagaaggagaacgctgctattttccgtccttgttttacgccgaacaaaatgtcgcaaaacgcgtgctcgacattgcggctcagacggagtatgccgatcaatttcctgaatcggaatttctgcttgcactcggtgaactggaagaacggatgaatgttcaatacgcaccaagccaaaaggatgccattcaaaaagcgctgtcttcaccgatgcttttactgaccggaggacccgggacggggaaaacgaccgttattaaaggaatcgtggaattatacagtgaactgcacggagtatcgcttgaccccggtgattataaaaaagacgaggcgttcccggtgctgcttgccgcgccgacgggaagagccgcaaaacggatgagcgaatctacgggtctgccggctgttacgatacacaggctgctcggctggaatggcgctgaaggctttacctacaatgaagatcagccgatagaagggaaactgatcattatagacgaagcgagtatgctcgatatctggctcgccagccatttgtttaaggcgcttcctaagcacattcagctcattgtcgtcggtgatgaagaccagcttccttcagtaggaccggggcaggtgctcagagaccttttggcttctgaggtgctgccgaccgtgcgcctgacagatatttaccgtcaggctgaaggatcatccattgtggaacttgcgcatgatatgaaaaaaggactgcttccaaaggggctgaccgcgccgacaaaggaccgctcatttatccgctgtaattcttcacagattaaagaagtcgtggatcaggtcgtctcgaacgcgttaaaaaaggggtatacctccagggatattcaagtgcttgccccgatgtacaggggaaaagcgggaattaacgagctgaatatgcttcttcaagacatcatgaatccgccgaaagaaaaaaggcgggagctgaaattcggagatgtcgtctacaggacgggcgataaaatattgcagcttgtcaaccagccggaaaacaatgtgtttaacggcgatatcggcgaaatcgtatccattttttatgccaaagaaaatacggaaaaagaagacatggtcgtcgtctcatttgacggcaacgaaatcacctttacgaaaaaggatttcagccagtttacccacgcgtactgctgttcgattcataagtcgcagggaagcgaattcccgattgtcgtcctgcctgtcgtcaaaggctactatcgaatgctcaggagaaatctgctttataccgccattacaagggcgaaaaaatttctgattctttgcggagaagaagaagcgcttgaatggggcgtcaaaaacaatgatgccaccgtcagacagacatcgcttaaaaacaggctcacagagcagactgaagagatggatgcagaactggccgccctgcaaaaagagctgccgttcagtgtatatgatgcgaacatcggaatggaaggcatcacgccgtttgactttatggaagaaaaagcgtaaataaaacccggagcataaacaagcgccgggttttcgcctgtggaagtcatttcaaagtatgctgcccggcttcttggcaaaacctatacgtgttcaacaaaaggtggttgatcacactttgagaacatgccatgcagctgaaggacgaacagtatatgacgaaaacaccgggcgcagtctcgggatgatatcggatgtatgtttctctctggacggccggtttctcggtttcgtgctggagcagaaacgcctgtttcataaccgccatctttttttagaggcaagtgatataaaagagatggatcaagaagccgtagctgccggtcatgctcatttgcagcctttgccgaagagctgtttcacctttgaacagattaagatgcagccggtgaaatcgcctgatggtgaaatgttcggtttgctggaagatgtatacttttgtttggacaggggcataatcgtagcatatgaactctcggacggcttcttttcagatctggctggcagacgccaagtgcgccgcgccgccgatacgcttattgaagcggggaaagaaggcatcgtcctgaacggataagaggtgtagtctgtgcttgtatgtccgaactgcaaaagtaaagatatcggcaaaatcggcgtaaaccaatactattgctggggctgcttcattgagctgacggtagccaaaggcaaaattgcgacacatcaagtagaggaagacggcacgttaagcagtcttgatgatttgttttctgaagacgaacgcagtatcaatttttaaagttgaaaggagatacgcgcgatgggcagaacaatgacctctctgttggctttaggagctggagccgttatgtatcgtatggcttctcagtccgatatgctgaataaaaaaggtatgaaacggatgagaagacgagtcatgaaaatgttttaagcagaaaaaaggatacttctccggaagtatcctttttacgtttgtctcgcttccagccgtctggctgcgagagacaggctgtaattgaccgcgaaatacatcagggccgccagcagaaagatcgggaaaaagtaccctccgtcagcgctttgtccgtttaaaatctgcgcgttatgaatcagttcgggcagagcgatgacgaccgcaagtgacgtatcctttaataaagaaataaactggctcacaatcggaggaaccatacgcctgagcgcctgcggcatgacgacgagaaaaagagtctgcgtgtacgtcagtcctgaagaacgcgccgcttcaatctgccctttgtcaacggattgcaaaccgcttctgatgatttctgacagcatggccgattcaaaaatcgtaagcgccgtgatggcagccgcggtaatttccagtttgatcccgatttccggaagggcaaaaaacgtaaagaaaatgattaataacagcggcaggttgcggatggtttccacaatggccgctataatgcccgagacgataggaattttcgcatagcgcaaagtgccggcggcaagcccgaaaataaaactcaggacaatggagatcagcgcaacataaagtgtgaccaaaaagccgtcccataaaaacagcagatggtcaggtgtataggcgccgctaaaatccatgtttttcactctccttctctaataactctttccgagacgtctttccaaatagtgaaccccgatgctgagcgggatcgttactatcaaataaaaaagcgcgacgaaaatatagacatcaaacacgacaagagtgcttgaggaaacgagatccgcctgatacatcaaatcgagtcccgccaccactccgagtattgatgagtttttgacaaggttgagaaattggtttccgagcgggggaatcacgatttttacggcctgaggaagaatgacgtatctcatcgcctgactgtaggtgaagcctgacgatctggccgcttccatctgccctttggagacagtctgaattccggctctgatggcttctgcgataaaggccgacgtgtatatcgtcagcgcaatcgttcccgcctgaaagccgtccagtctcagcccggcgttcggaagtccgaaataaaaaacgaatgtgatgaggagaagcgggatgttgcggataaattccacatacgcagtgccgatccattgaaggggtttgaaagccgtgattctcatgactgcgatcagaacgcccagcgcaaagctgcctgccagcgcgatgaagctcgcaagcaatgtgtgcaggaaaccgtccatatacatatcgaagttttccgttaaaattgaaaagttcatctatgtcactccttataaaacggggatgagcatgcctgctcatcccgcgatcctttctattttgccggttcttctttaatccattttttatagattttttcgtacctgccgtcggctttcatttttttcaaagaggcgttgatttccttgatgagtccggattggccttttttgacggcgattccgtaaggttcatcggtgaaggtttcgcctgtcagctgatattgtttattttcatctgccatgccgtataaaatcgcattatcagttgtgagcgcatctccctgtcccgctttaagcgcagtgaacgcttcggcgtaattttcaaattccagcactgaggcgtcaggcgctttttctctgatgttttgtgaggaagtagagccttttaccgccaatacttttgagccttttcccaggtcttcggtgcttttgatgctgcttccttttttgacgagcagggattgcccggcttcaaaataaacatctgagaaatcaacttcttttttccgctcatccgttatcgtcatcgtggcggtgatagcatcgatatcgccgttttgcagcatcggaattctcgtttttgacgtcacttctttaaattccgctttcttctcatcccccagaatatcttttgcgagctgttttgagatatcaatatcgaagccttcaatatcaccggagcttgggtttttcagcccgaataacctcgtgtcggttttgacgccgaagatgattttgtctctgtctttaatagaggctaacgtgtcttttcccgttccttttgaatctccggacgtttctttccctccgcaggcggccagcataaagacggccagcagtgatatcaacccgaatgacaaccattttgttacacgtgacataagcactcctccgtttcttttcagtgatttaaaatacggcttaagaataaacgcgccctctcttcacgtgggctttcgtaaaattcagccggtgcagcttcttctaagatggctccgccgtcgataaacacgatgcggtccgccacttcttttgcgaatcccatttcatgtgtgacgactgccatggtcatgccttcctttgcgagtgttttcatgacatccagcacttccccgatcatttccggatcaagcgcggatgtgggttcatcaaacagcataatttcgggcttcatcgcaagccccctggcgatggcgacacgctgctgctggccgccggaaagctgtgaaggataagcgtccgctttttccggtataccgacttttttcaaatagtataaggccgtttcttttgcttcttcttttgattgcttaagcactttgatcggtgcgagcatgatgttttgcagaacggttttgtgcgggtacagatgaaaatgctggaacaccatgccgatattgcggcggaccttatttatatccgttttcttgtcatggatggagacgccgtttaccgttaaggcgcctccatcaactgtttccagctgattaatgcagcggagaagcgtgctttttcccgatcctgaaggtccgatgataacgacgacttccccttttttaatgtgcagattaatgtttttcagcacgtggaaatgtccgtagtgcttatttacatcctgaaatgaaatcatggccatcctccttaaaaaaacatgagtcatattgactggacagtttttgaaatcctttaacacattacgatggttatacagatttttatgaatattatttagattatttcgtaatttctgataattttttccgtcaagaggtctgcgtcataaggcggagtttatgaaacgggaataattccggctttctgtcaaaagataaagcaagaggtgaaacgtcatgcttcaaaaaccgctgcagctcttaatgtggacggctgtatgtctgctcgttttgttaacagtgtatgtcttttgcatgctcgatatgttatggtctcccatttggcttgttataaaatctctctttattcctatattcatcgcagtatttattgcttatcttttacttccgattactgaatggcttcatagaaaagggatgcctagaactttaagcctgcttctgatttattgcctgtttttcggcggaatcggctggggggtttataaaggggttcctgttttaattgaacagctgcaggatctgtctgagagcattcccggtcttgccaaaaactacaacagcatgctgaagcatctgcataatcacacggatcattggcctgacggcatgcaccatcgaatggacaaaatgattcagcagacagaaacgtttcttgccggcacgattgaaagcacgatcagaagcatccgtttcgtgcttgattatatcctgatcgcggcgacgattccttttctcgtgttctatatggtgaaggatatagacgtcatgaaaaagacagtctggtatttgacgccgaagtcctggagaaaaagggggagtgaatttctgcgggatgtggacgactctctcggtgattacatccgcggtcagcttctcgtttgttttttgctcgggctaatagccggcgtttcattttggctgttcgggcttccttacccgctgattttgggccttgccatcgggattacgaatgtcatcccgtatttcggtccgtttatcggcgctgtaccggcgctgctccttgcgctggcgatttctgctaaagctgtgatcatcgtaatcgtcacgatttttattctgcaatttatagaaggaaacattttgagcccgcttattgtcgggcgcagtctcagaatgcaccccgtcgtgatcatgctggcgctccttgccggaggagagctcgcgggcattcccggcatgattctcgctgttccggcggcagccgttttaaaagtgacggccatacactttttgcggatcaggacggaacattgacattcgggttctgcttgtctataatttcgagtagaatacatacgaatctcgagtgacggatatgagtacgccgaagccctgtttaagagagaagctccgatacgctgaaaggagcttcagcagaagatcggcggaagctaatcctgagtgcagttaaaggctgccgcagtcctgcgttacgggatgaaaggtgacaggcctttttcggcctgtaatcagggtggtaccgcgagacagctctcgtccctgtgtgaacgcatggtttgcatagggagagagcttttttgctgtcgcaaaagagaatttcgggtagtgataaggaggaatatagatgaaacacttaacttctgctgaagtgcgtcaaatgtttttagatttctttaaagaaaaaggccatgccgttgaaccgagcgcctcattggttccgcatgaagatccgtctttattatggatcaacagcggcgttgcgacgctgaaaaaatactttgacggccgcgttgtgccggagaatccgagaattgtaaacgcgcaaaaatcaatccgaacaaatgatattgaaaatgtggggaaaacggcgcgccaccacacgttctttgagatgctcggaaacttttccatcggtgattattttaaagaagaagcgatcacgtgggcatgggagtttttaacgagcgaaaagtggatcggctttgatccggagctgctgtctgtaacggttcaccctgaggatgaagaagcttatacgctatgggcggaaaaaatcggcgttccggaagaaagaatcatccgtctggaagggaacttctgggatatcggcgaaggcccgagcggaccgaatacggaaattttctatgaccgcggcgagaaatacggcaatgacccgtcagattctgaattgtatccgggcggcgaaaatgatcgctatcttgaagtatggaacctggtattctcagagttcaaccacaacccggacggcacgtacacaccgcttccgaagaaaaacattgatacgggcatggggcttgaacggatggtctccgtgattcaggatgtcccgacaaactttgacactgatttgtttatgccgattattgaagcaacagagcgcatttccggagatgcttacggaaaggatgcagtgaaggatacggcctttaaagtgatcgccgatcatatcagaacggtcgcatttgcggtaagcgacggggcgctgccttcgaacgaagggcgcgggtatgtactgagacgcctcttgcgccgggcagtgcgttacgcgaaaaccctcggtatcagccgtccgtttatgtacgagctagtaccgactgttgcaggaattatggacgctttctatccggaggtgaaagaaaagcaagagtttatcgccaaagtcatcaaaacggaggaagagcgcttccacgaaacattaaacgaaggtctggccattttatccgacgtgataaagaaagagaaggaaaaaggcagcggcatcatctccggaaaagacgtattcaaactgtacgatacgtacggattcccggttgaattgacggaggaatacgcggaagatgagcaaatgacggttgaccataaaggctttgaagccgaaatggaaaaacagcgtgaacgggcgagaaatgcgcgccaagatgtaggaagcatgcaggttcagggcggcgcattgcgcgatattaccgcagaaagcacatttgtcggctacagtgccgtaaaagctgaagcgaaggtgatcgagcttcttcatgacgggcaattaatcagcgaggcgcatgaaggggataccgtccaaatccttcttgacaaaacgcctttctatgctgaaagcggcggacagatcggtgacagaggagtgctgagaagcgagcaggctgtcgtaaccattaaagacgtgaaaaaagctccgaacggtcagcatgtacacgaaggcacggtggctagcggcacgattcaaaaaggcgcaagcgtgacggctgaagttgaagatcaaatgagaagcggcgtggtgaaaaaccatacggcaacccacctcctgcaccaggcgctgaaagacgttctcggcacacatgtcaaccaagcgggttcactcgttaccgaaaatcgcctgcgttttgacttctctcatttcggtcaagtgacgaaagaagaacttgaacgcattgaaggaatcgtcaacgaaaaaatctgggagagcattccggtagcgattgatttgaaaccgatcaatgaagcgaaagaaatgggcgcgatggccctgttcggcgagaaatacggcgatattgtccgcgtcgtacaagtcggagattacagccttgagctttgcggcggatgccatgtcacgaatacggctgaaatcggcctgtttaaaatcgtatccgaatcagggatcggcgcagggacgcgaagaattgaagccgtaacaggaaaaggcgcttatcaggaaatgaacagccagctcagccttctgcagcacgctgcggacgagctgaaatcaaacgtaaaagacgtaccgaagcgaattcagtctcttcaagcggagctgaaggaagcgcaaagagaaaatgaatcattgctcagcaaacttggcaatgtggaagccggagccattctgtctaaagtaaaagacatcggcggcgtaaaagtgctggctgaaaaagtaaatgcgaaagacatgaaccaccttcgcactatggtggatgatctgaaagcgaagctcggttctgcggtcatcattctcggcgccgtgcaaaatgagaaagtcaacctttcagcaggcgtgacgaaagacctgatcgaaaaaggccttcatgccggcaaaatggtcaaacaagcggctgaagtctgcggaggcggaggcggaggccgtccggacatggcgcaggccggcggaaagcagcctgaaaaattggaagaggcgctggcatctgcggaagattggataaaatccgttttataatcctttcaagtagtgtagaatgatgataagatgaggacctcaggctgaactttgcctgcgaatttgggaaagaggtgcaaaacggtgagctcgtttgataaaacgatgaaatttaatttctccgatgattctgctgaaacaaacgtcgaagaagtgctgaatacggtatatgatgcgcttcaggaaaaggggtacaatcctatcaaccagattgtcggatacttgctgtctggagatcctgcatacattcctaggcatcgcgacgcccggaacttaattcgcaaactggaacgtgacgaattaatcgaggaattggtaaaatcctatctagaacagcataaagaggcgtaaatacattcatgagaatattgggacttgatcttggaacgaaaacactcggcgtagctttaagcgatgaaatgggctggaccgctcaaggcattgagacgataaaaataaacgaggctgaaggagattacggtctggaccgtttatccgagctgatgaaagactataatgtagagaagatcgtgctcggttttccgaaaaacatgaacgggacgatcggtccgagaggcgaagccagccaaacatttgcgaaactgcttgaaacagcgtacaatgtccctgttgtgctgtgggacgagcgtctgacgacgatggcggctgaaaaaatgctgatcgcggctgacgtcagcaggcaaaaacgaaaaaaagtcattgataaaatggcggctgtcatgatccttcaaggatatctggacagtttaaactaagaggtgaaaaaaatggaacacggcgaaaaacacattacaattgtcgatgatcaaggcaacgaacagctttgcgaagtgctgttcacatttgaaaacgacacattcaacaaatcttacgtactttattatccgattgatgctcaagacgatgatgaaatcgaaattcacgcttcaagcttcgaaccgaacgaaaacggtgaagacggcgaactgatgccgattgaaaccgatgaagagtgggaaatgatcgaagaaacgctgaacacgtttttagcggaagaagacgaagaataaaatgaacggaaaaagccggagcgcatatgcgcttcggcttttttttgtaataaattgccgaatgcacatgaatcatgtagtataagagctgttgggaggaaaatacttgtatgaatatcaatcagactaaacattcatttccgcgtaaaaacaaaaaaacgacgataatactgtcctccgtgatcgctctgcttatcatcatttgcggtgcttttttctatggaaaatctctgctgtccccggttgacaaaggcagcaaaacggcagtcaatattaatattccgagcggttcttccgtttcggcaatcgctgaaattcttgaggatcagcatgtcatcaaaagcaaaaaagcatttcagctgtatgtgaagtataaaggcgcttccgggtttcaggcgggattttaccacctgaataaaggaatggatgcggatgcgattatcaaaaaactgaccgcgggatcaacgggatatgcctttcagatctccgttcctgaaggaaaacagcttacacagattgcggatgcgatcgcaaaagaaacatcatattcaaaagaagagatcatggcgaaactggatgacaaaacattcatcggcaaactgaagaaacagtttcctgatacgataacggacgcactttcaaacaagaagctcaagcatccgctcgaaggctatctgtatccggccacatatccgtttaatgatccggatgcatcgcttgacacgattttgacggcaatggttcaggaaacaaacacccgtatcgaaacgtataaatctgaactggaaaaaaagaaactttccgttcataacgctctgacgatggcatcgcttattgaagaagaagccaccgccaaagccgaccgtcacaaaatcgccagcgttttttacaacaggctcgaagaaaaaatgccgctgcagactgacccgacggtattatatgcggccggtaagcataaaagccgggtctactacaaagacctgaaaattgattctccgtttaatacgtataaacataaggggctgccgccgggaccgattgcaaatgccggtgattcatcatgggaagcggctctccgccctgacaaaacggattatctctatttccttgcaaaatcaaacggcgaggtcgttttcaccaaaacattaaaagaccataataaagcgaaggaaaagtatatttccaaaaaagacagcgaataaaaggagggcaaaagctctccttttattccattctgaaaggttttatgataaaatatatcgggttgtttacttatggataaagaagtgtcttaagagagtgtccccgcggattcgtcaggggcactcctttttagaacggaggctgtttgccgtgaatgatcggtatgaacaaataaacgagtatataaacgcgatgctgaagcctcggcctgataaagtgaaaaagcttgaagcctatgcaaaagagcaccatgttccgattatggaagaagcgggcattgaagtgctgcttcaaatgctgtcgattcaacaggcgaaaaacattttggaaatcggcgcggcaatcggatattccgccatacggatggcgcttgagcttccggatgcgaatatttacacgattgaacgggacgacaaacgctatgaagaagctgtgaacaatataaaagactttgaaatggaaaaccggattcacgtaatgcacggggatgcgctggatctttctgagtctgtccgtgtcacggctccttatgatgccatttttatcgacgcggccaaaggccagtacacgaacttttttgagctctatgaaccgatgcttgcgccggatggagtcatttttacggacaatgttctgtttaaagggctggtggcacaaaatcactcggacattgagccgaaaagaagacggaagcttgttgaaaaaattgatcaatataaccaatggctgatggaccggcctgactatcaaacggtcatactgccggtcggagacggcatcgccatcagtaaaaagaagaggtgaaggatcatgaaaaaacctgaacttttggtgactccgacttctgtacaggatattcttccgctcattcaagcgggcgcaacggccctgttggtcggagaacagagatacggcctgagactggccggtgaattttcaagagaagatataaaagaagccgtaaagacagctcatcaggaaggcgcgaaagtgtacgccgccgtcaatgctatttttcacaacgaaaaagtggacgagctgaacggctatcttgcctttttgcaggaggccggcgttgatgcggctgttttcggtgacccggccgttttaatggcggcgcgtgaagcggctcccgagcttaaactgcattggagcacggaaacaacgggaaccaactactattcctgcaattactggggacgcaaaggcgcacggcgggcagtgctggctaaggaattaaatatggacagcatcattgacataaaagaaaacgccgaagtggaaattgaaattcaaatccacggcatgacgtgcatgttccaatcgaagcgttctttagtgggccattacttcgaataccaaggtaaagtcatggacatcgaacagaagaaaaaagaagcggggatgtttctgcatgacaaggaacggggcaataaatacccgatttttgaagatgaaaacggcacgcacatcatgagcccgaacgatgtgtgcatgattgatgaattagaggacctgatggacgccggcatcgattctttcaaaatcgacggagttttgaagtctcctgaatacttaactgaagtgacccgcatgtacagagaagcaatcgatttgtgcttcgaaagccgagagacatacgaagagaaaaaagagagctggatagagcggattgaaagcattcagcctgtgaacagaagcatcgacacaggattcttctttaaagaaacggtctattaaaaaggagggtgcaacggatgacagccgtaaatcaaaccatttccaaagtcgtaaacggaaaacgcgtcattacgaaaaaacctgaactccttgctccggcaggaaaccttgaaaaattaaaaattgccgttcattacggagcggacgcggtttttatcggaggacaggaatacggactccgctcaaatgcggataacttctcaatagaagaaattgcagagggcgtagaatttgccaaaaaatacggggcaaaaatatatgtgacaacaaacattttcgcccataatgaaaatatggacggtctggaagaatacttaaaagcgttgggagacgcaaaagttgccggaattatcgtcgctgatccgctgattattgaaacatgccggagagtggccccggacgtagaaattcacctcagcacacagcagtccctttccaactggaaagcggtgcagttctggaaagaagaagggcttgaccgcgtggtgcttgcccgtgaaacgagcggactggaaattaaagaaatgaaggaaaaggtggatattgaaattgaaacctttatccacggcgccatgtgtatcgcttattcaggccgatgcgtgctgagcaatcacatgacggcccgggattccaatcgcggcggctgctgtcagtcctgccgctgggattatgacctgtatcagacagacggtgcaaacgcggtcgcgctctatgacgaagaagacgctccgtttgcgatgagcccgaaagatttaaaattaattgaatccattccgcaaatgatcgagatgggcatcgacagcctgaaaattgaaggccggatgaaatcgattcattacgttgcgacggttgtcagcgtgtatcgcaaagtcatcgacgcatactgcgctgatcctgaaaactttgtcattcaaaaagaatggctggatgagctggacaaatgtgcaaaccgggataccgcgcctgctttctttgaaggcacgcccgggtatgaagagcagatgttcggcgaacacggaaagaaaacaacatttgattttgccggtctcgtgctcgcgtataacgaggaaactcaaatggtgacgctccagcagcgcaatttctttaaacaaggtgacgaagtggaatttttcggtcctgaaatcgacaatttcacattcacaatcggcactatttgggacgaagacggaaacgagcttgatgctgcccgccatcccctgcaaatcgttacatttaaagtagacaaaaagatttatccgagcaacatgatgagaaaggggaagtaatcaccaatgggtaagagtcctgtagttataggcatcgcaggaggttccggatcaggaaaaacaagcgtcacccgttccatctatgaacagtttaaaggacactcgattttaatgatccagcaagacctttattataaagaccaaagccatcttccgtttgaagaaaggctgaacacaaactatgatcacccgctcgcatttgataatgactatttaatcgagcatattcaagagcttttgaattaccggccgatagaaaagccgatttatgattataaactgcatacgcgttctgaggaaaccattccggttgagccgaaggatgtcatcattctggaaggcattctcgttctcgaagataaaaggcttcgcgacctcatggatatgaaactttatgtcgacacggacgcggatctccgtatcatcagacggattatgagagatattaacgaaagaggccgttcaatcgattctgtcattgagcagtatgtgtccgtcgtcagaccgatgcacaatcagtttgttgaaccgacgaaacgctacgcggacatcattattccggaaggcgggcaaaaccacgtcgcgattgatctgatggtcacgaagattcaaacgatccttgaacaaaatgcaattttgtaataccatagcatagacataaataactcagaccatattatgtataggctggaagggaatgagacagttcccttctttccctgtttataaaccgaaacatttgcagaaaacacacattcagtttaagataaacagtacctatatgggagagaagaacgaggactgccctgtgttctcattcttgattttttcgtttatgctctcatacataatcacacgttattgttgagggacaaccaccaaggagtgaaggaacatggcacaagaaaaagtttttccgatgactcacgaaggaaaacaaaaacttgaacaagaattagagcaattgaaaacggttaaacgcaaagaagtagtagaacgcattaaaatcgcaagaagcttcggagatctgtcagagaactctgagtatgattctgcaaaagaagaacaggcatttgtggaagggcgcatcacgacgcttgaaaacatgatccgcaatgcgaaaatcatcgaggacgacggcggttcaaatgtagtcggtttgggaaaaaccgtatcattcatcgaattgccggacggtgaagaagaatcttacacgattgtcggaagcgctgaagctgatccgtttgaagggaaaatttcaaacgactcgccaatcgccaaaagcctgctcggcagaaaagtggacgaagaagtgacagttcagacgccgggcggagaaatgctcgtgaaaattgtgaaaatttcataagatccgtttaacattgaaacacctcgtccaaaatgtggatgaggtgtttttttatgatcgtatcaaaaaggctgaaagcggccgtgatttgttttctgctcgtgtttttctttctgcttgcgaggctggctgaaattcagctgtttttcacagaatctttttcaaaatccaatattaatctgattcaggaaagcgtcaagcagcggacggaagaagtccttatttcagacggacgcggctcttttcttgatcggaacggcaaagaactgaccggaaaaaagcagcctgccgtcatactgtttccctttctcgtgacgcaggattggccggttgaccgggtatcagacattctcggaatgaaacagggggagctcaggcagctgctcacggaagcgaaaaaaccggtggtcctgaacagcagaaaaataaaacatttgacgaaacaatccgtgtcaaatatcaattctttgaaatatcccggcatttacggcgtatatatgaaagacagcaaagaaacaaacatagccgctcatctgttgggcgcgacaaaccaggaccctgagcttttgaaaaagaaataccccggcaggaaggaactgccgatcacggcaaagatcgggacaagcgggatggagcggacgtttgatgagtttttactggcggatcaggacacaaaacttttgtatcatgtcgacggaaggggaaaccctttattcggaatggacgtcaaatatacggctgaagcaaacgcgttttatccgctgcaagtcaaaacctccatcgaccgcaatattcaaaaagcaatggaagatgtattgaaagaccgcgggttaaaaaaggggggagccgtccttttagacattgaaaaaagcagtgtgctcggaatggtatcaaagcctgacgccgacatgtcaaagcagcagacactgcaaaattacatgctgacgccgatttatccgggatcagtatttaaaacggtgatcgccgcagccgcaatagaacaaaacgaagtgaagccgggcacatcctttaactgcaatctcaacctgtacggagagccgggggatgacaaaggcacgctcagttttggagaaagctttgcccaaagctgcaattatacgtttacaagccttgcggaaaaattgatcaaaaaagatgattccgttattgaaaacatggcggaaaaactcggtctcacccagcgggcggggtgggaaggcaagctgtaccgggaagacggattcaggcagctgtataatgaaaaaagcggggtcatttggggagatgacaaagacaaaaccgtaaaaaaagccgtcgcacagacggcgatcgggcaaaaaaacgtgaaagtcacgcctcttgaagtcgccaatatgatggcggcgatcgcgcgcggcggtgaaaaaaaacaagtcaaaatcgcggacaaaattgaatacaaaaacaaaacgacaatggcgtcattcaaagaacagccgttaaaaggggaaaacatcgacaaatatacggcgcagcagcttcaaaaaattctcagagaagtcgtcacctcaccgaaaggaaccggccgaaggtttcaggacctgccgtatgagatagcaggcaaatcgggaacggcccagacgggaatgttcacaaaagaaaaacagacgctttaccacaaatggtttgcgggatactttcccgcggacaagccgaaatacgctctcgtggtgctgcacatggacacgccgggggataaggctctgacaaatacagtgttttatgatattgttaaaaaggtacatgaaaatgaaataaatcagacatagaacaaccgctcagcccatgttaaaatatatgctgagcaagagggataaaggagtgcagaatgattgagcaataaacaatctcgttttgaaaaccgtgataagcgcagaaaagcaaatatggtgcttaacattttaattgctatcgtatctattcttattgtcgtcgttgccgtcagcctcttcattaacagtccgtcgagcgacgtgagcgaaaaagcggacacgagccagaagcaggaaacacctgcatcaggcaagacgaagcagacatccgatgaagacataaaagacagcaaaaaagatacggcatcagacgatgacaaaaaagataaacaggataaggacacatctgattcatcttcagactctgacagcaaaaaagaagatgattcatcgaaaagtgatgacagcagcaaaaaagactctgattcaagcgatccttttaaaggcgcaaaaataacagagggcggctcatcaagcgatgtcgagaaaacaattgttaacccaaaatggaaagcggtcggcacaaagcagacgggagaacatacggcgacgtatgactcaagctctgaagactggtccgaaatgcttgacgccatctcttacgcaacaggcgtgtcaaaagatcatatgacagtgctgtggctcggaaacaatggaagcccgcaagatgcgaaggggaaagttttagacaaaacgaacggcaaaaagtatcaggtcaccatcacttggaaagacaaaaaaggctggaagccgacaaaagtagaaaccttaaaataaccgcaaaaaagcagctgattattcagctgcttttttctgtcatacgtcagctgaaaaatgcaccgacgcgctgtaaaggattctgccgtcaacggccgtcacctgatgggatacggaacggacgcgaagcataatcgcctggttgttttcaatctgaacgtttattttcttttcaagctcctgcaaagatgccgcttcgaaaaattctactttatctttgattaaatccaattgaaaattcatcagtacagatcctcctgatttttcttctgagtcaatgaaagtataagcctttctgccgtaattgcgcaataatcccaaagtattttagtacccttccattcttttttgtgataggataggaactgttccacgattaatccatactatactcataggaattataaattatggagagtgaaaaatatgggccgtgaatttattcctttatttgaagattgggcagcgacttatgatgccacagtgcacggggctgacaaacaatatgccgctgtttttaaaggatatgacaacattcttgacagcattgtcgcactttcaggttcaaacgttttagagttcggaccgggaacggggaatttaacggcgaaattagccgccgcgaacaaaaaggtgtttggtgtagaaccgtctccgtcaatgagaaaactggcggctgacaagctttctgacaaagccgtgttcagtgacggagattttctggagtttcccgctccgccttttcaaatagataccatcgtcagctcgtacgcctttcatcatttaaccgatgaagaaaagcgaacggctgtaaagcagtatggcgcaatccttcagaagcatgataaaatagtgtttgccgatacagtctttaaagatcatgaagcttatgatgtagccattaaaaaagcaatccgaaacggctatcatcaattagcggacgatttaaagacggaacattatccgacactcgggacaatgaaaaacatcttttcagaagagggatttgccgcgcggtttacgcagcaaaatgactttgtctggataatggaggcgattaaacggtaaatcgaagggattgtgtataaatgaaactggcagtcatcggagcaatggaagaggaagttacgattttaagaagcaaactgaaagacgcaaaacaagagatgatcgctcactgtgagtttacaactggcagctatgaaggcgtcgaagtcatcttgctgaaatcaggtatcgggaaagtcaacgcggcgatcagcacgacgcttctgcttgaccgtttcaaacctgattatgtgattaacacaggctcagcgggcggttttcatcatacattgaatgtaggcgacgtcgtcatctcaacagatgtccgccatcatgacgtagatgtgacggcgtttgactatgaatacggacaggtgccgggtcttccggcagcatacaaagctgatgaaaagctgatcagtattactgaggaagcggtttctgaactgaacggcattcaagtcgccaaaggcacaatcgctacgggagattcttttatgaatgatccgaagcgggttgaagacgtacgcgccaaatttgcggatttgtacgcggttgaaatggaagctgcggctgtcgcacaggtgtgccaccagttcaaaacgccttttgttgtcatcagagctttatctgatattgccggaaaagaatctgacgtttcatttgataaatttttagaacaggctgccgttcattcaactgagcttgtcctgaatgtcatcaaacgaattcactaagcgggggattctcgttctcctccgcttttcaaggaggaggacatatattgaacgtgataacagatattacagaactgatcggaaatacaccgctgctccgtctcaagcattttgatctaccggagggaacagcggtttatgctaagcttgagatgatgaatccgggcggaagcattaaagacaggctgggcgggatgctcattgaagatgcgcttcgcacgggaaaggtgaaaccgggcggcgttatcattgaggcgactgccggaaacaccgggatcggactcgctctgtgcgccagaaagcatcagcttcgcgccgttttttgcgtcccggagcatttcagcagagaaaagcagcaaattatgaaagctctcggagcggacatcgtgcatacgccgagagaagaaggcatgcagggagccatccgaaaagcgcttgaactggagagagagattaataattcttatgccgttctgcaatttaaaaaccgagtaaatccattgacttactacaaaacgattggacctgaaatatggaacgcgctcggcggggatatccacgcttttgtcgcaggagcgggttccggcggcacctttgccggtacggcagcttatttaaaggagaaaaatcctgccgtcaaaacggtgatcgttgaaccggaaggctcgatcctgaacggaggagagccgcatgcccataaaacggaaggcatcggcatggagtttatcccggattatatggacgagaaccattttgacgccatttacacggtggaggacgatacggcgttttcgcttgtcagagaagcggccgagaaagaaggcctcttaatcggaagctcttcaggggcggctctttatgcagcgcttgaagaagcgaaaaaagcgcccgccggatcaaatatcgtcaccattttccctgacggcagcgatcgatatataagcaaaaacatttttcaaggaggtcagtaagatgaagaaaaaaacgctgatggtgcacggaggaattacgggagatgaaaaaacaggagcggtttccgtaccgatttatcaagtaagcacgtaccggcagccgaaagcgggcgagcacacgggttatgaatattcaagaacggccaatccgacgcggacggcgcttgaaagcttaattgcagagcttgaaggcggcgcggcgggatatgcgttcggctcaggcatggctgcgattactgccgtcatgatgctgtttgacagcggcgatcatgttattttgacggatgatgtatacggcggcacttaccgggtgatgacaggcgtgctgaaccgcttcggcattgaagcggactttgtcgatacgagcagtgaagaaaaagtcaaaaaggccattcgcccgaatacgaaagccatttatatcgaaacaccgacaaacccgctattgaaagtgactgacctcaaactgatgtctgacatcgcaaaagaagcgggcgtattgcttatcgtcgataatacgttttacacgccgtatttccagcagccgctcagcttcggcgctgacatcgtgctgcacagcgcgacaaaatatctcggcggccacagcgatgtcgtcggcggcttagtcgtcacggctgataaagaactgggcgaaaagcttcattatgtgcaaaactcaacaggcggcgttttaggaccgcaggattcatggcttttgatgagaggcattaaaacactgggactcagaatggatgccatcaatcacagcgccggaaaaatcgccgggctgcttgaagcgcatgatgccgttcagacgctttactatccgggatcagcgaaacatccgggccatgagctgacaaaagcgcaaagctccggtttcggcggaatgatttcctttgatgtcggcagcagcgaacgcgtcgacgcgtttttagaaaaattgaacctgtttacgatcgcggaaagtttaggagcggttgaaagcttaatctccgtgccgtccagaatgacgcacgcttcgatcccgcgcgaccgccggcttgcgcttggcattaccgacgggctcgtgcggatctcagtcggtattgaggatactgaggatttaacggcggatgtgaaacaggcgcttgattcacttttataaagaatggatagatttacattctctgtcggctgtcagcttgtattataatgttggtagactataaaactggcaggtgaccttatatggagaagaaaagactgaaatcattaatagaagattttaagcattacgcatttattctgcttgcagtcagcaccttcatttatatcggcgcggttcttcccggacaagggctgactgcgggccagaaaatgctgatgtttgtaacggattgtgtatttttagcgggcgcttatttctgcgttgaccgttcacttatttataaaaagaggctggaagaggccgaagaataaaaaaaagccattgtctttgggactgccccccgtttttgagacaggggtcaaaacaccttttaaacagccaattgccgatagtttatcggtgattggttgtttagtttggtttgaatacgaatattgttataataatgaatgtattctatgacagtgcgttctacgatggcagtcgtagttcgatcaatgctgttaagatagaacgtttcagactttagcgaggaatgaaacgattcgatggaggcattatcagcgggcgtccctttgcgggacatgctcatggtaatgccttttgttttaacagctttttgatactcgtaagatgtatacacagaaccttggtcactatgtaacacgcagttctcaggcagcattggtagctgatcaagtgtgtctaagacaaaggctgtgtcctgcttatccccaatagtaaaagcaatcacttctccattgtataaatctaatatactggaaaggtacaattgtttctgtccataaggcaaatatgtgatgtccgttactagtttttcaagaggacgatcagactgaaagttccgatccaatatattatcgaccacggcatatggctgcccatccttcttgcgctttttcaccttaacccgacactgccattgatttttctgcataatacgttgaaccgttttatggttaatacacattctcttttttagtatggctgtgatttttcgatatccatatcgatacttgtgctctcggcacaacgtgccgatttgtttttccaaatggcgcttgggatgatccttcatcagattcttcttccaacgataataagacgctcgagagatacctaaatgaatacagatatcctgtacggtcattgtgctgtgcaatatttctacaagttcgactgacgtttcgctatcaacttcctttccaattcgttgtacttttttaaaacttcattctgttgtctcaggtaacgaatctctgcctgcagtttctctaaatcggaagaatactccggaccttttccgtaagtgtattgctttccaacaggctgttcgaatcgatgtgtatcaccagccttataccatctaacccatgtctgaacctgtgtcttattcttaatattcaactcctgcaggatctctttcataggtacgcctgccaatctcatttctacagccttctgtttcacttcaaccggataactcactcttgtccccatagaaaaaacacctccaagtctaatttcggataacaatcatccgtattcaaacttgaaggtgtttttatttgtctcatcttatggggtcagtccccttttgacaatggctttttcgtttcttattcagacggggtttcgcgtaattcttttcccattccttttaaaaactgcagcccgaagccgagcgcgcggttaatatcaggatcaccgagggctttcatcagttcaaacatactgactttcctgtcctcttttaaaaatctttgcgcctgatccgtcccggccatggcgctttctaaaagtctgcccataaattcgggatcagcttttgacagcgcgcctcccgcggccatcatcgtattcaggagattggtgacaggttcccgggaaatctgtccgagtgcgattttggcaatctcctcttttgcctggagcatatagccggcggcatcaaaaatgcccaagctattcagctctgccatgatggacatcgttttcgcgacggcttcttcattttctgcgagaagcgtcttcagctcttctagtttttcagctttcagctgttcctctgttttcgtttctttttgaatttcagtaattgggcttgccataatgtttcctcctttccttaatcagttaagtgcacatagcccggacggttccattttcgctgagcttccacaccgttttgcggatgacgttttttgttccgcggattcgttttcggaagcggcggagtatcacaggaaccaagcacttccatgcggacttttgtctgcttataggcaggtgtatgtgtccgtgaatcatacgcaggcccggtcaggaaattaatcgcagaatctttatctgtagagttcatcggcagataaagctcattcgcgcggacgcggtctgtcacaagcgcgttcaatttaaccgccccaaaaggagagacgagccggatcattgtcccgtcgcaaattccgcgttcagccgcgagctccggcgatacttcaacaaatacatccggaactttagactgaatgccttttgacttgtttgtcatgtttccttcgtggaaatgttcaagcatccgtccgttgttaatatgcaggtcatattcttcagggaatacagcaggctccacccaatcgctcagcgcaaaacgggcttttttgtccgggaagttaaagccgtcttcataaagaagcggagtgctttctcccgtaaagcttccccacaagaagctgttccagccgctaagaacgtcgtagcttgcttttccgaacagcggagaaaggctcgccatttctgagaaaatgtcgctaggatgcgtgtaattccaatcagcgcctaaacgattggcgacttcctgaataatccaccagtcgggttttgcatcgccgagtgtcggaagcgcctgatacaatctttgcacacgccgctctgtgtttgtaaatgttccgtctttttcaagagatggaaccgcaggcaggatgacatccgcgtattgcgccgttcttgaaaggaaaatatcctgcacaacaaagaaatcaaggctggataaaatgttatgaacatggttggcgtttgaatcgacgagcgccatatcttcaccgacgagatacatggctttcatgtttccttcttcaatcgcatggagcatttcgatattatcaagacccggcttgccgtcaatttcaacaccgtaagctttttcgaatttagcgcgtgccgcatcatcggtaatatgctgataccccggaagccagcctggaagagttcccatatcgcaagcgccttgaacgttgttatgtccccgcagcggataggctccggcgcccggacggcggtagtttcctgtggcaagcagcaggtttgaaatcgccgctgatgtatcagagccgcctgtattttgagtaacgcccatgccccaaagaacacaagtgccgtctgcatcacgaatcatttcggcaatgcggatgattgtatcctgagaaagtccggtgatgcgctccgcatattccaatgtgtatttttccagcgtttctttataatcatcaaagtagttgacattttcatcaataaacgcttgatcgtgccagccttggtcaatcatatatttcgttactgccatgagccagacctggtcagtcccttgttttgggctgataaagaggtcggaccgttcagccatttcatttctgcgcagatcggcaacaatcagtttttggccgtgcagtttatgggcgcgtttcacgcgtgtggccagaaccggatgtccttccgccggattggcgccgacgatgagcacgaggcccgcttttgcgatatctttaattgtgccagcgtctccgcccataccgacggtgcggaataagccgtccgttgccggtgactggcagtagcgtgagcagttatccacgttgttggtttcaaatacttggcgcgctaatttttggatgacgtagttgtcttcattcgtaattttagaagaagaaataaaaccgacagaaccatttccgtgttcggccttgatcgaaccgagtcttgaagcgacaagatcaagagcttcttcccatgacgattcaacaaatgcgccgtttttccggataagcggttttgtaattcgttcttccgaattcacgaagtcccagccgaatttccctttcacacaagtggaaatcgcgttaaccggagcatcggaaacaggctgaattttaaggatgtcacgtccttttgtccatacttcaaaagagcatccgacgccgcagaacgtgcagactgtttttgtttttttcgtccgtttatcgcgcatagccgcttccacttcagacacggcgaagatgcttgtatagtcgggttcaacatttttcactaaatcaatcatcggttccatgacatcttcttttattcctgtcataaatccggcttggccgatcattgatttttccatcagtgcgttacaaggacagacagtgacacactggccgcagctgacgcaggaagattcattaatggcgacgccttcatcccaaatgacccgcgggcggtcgcgctcccaatcaattgaaagggtctcattcacctgaaggttttgacacacttccacacattggccgcaggcgatgcattggttcggatcatagcggtaaaacgggtgagacatatcaaccgcgcactttgaatcatctttcggcgtatacggatatttctgatgctcaatccccatcatttccgctgtattatggagtgtgcaattgccgttgttgttatcgcataccgtacagtaaagcaggtgattctcgagcaggcggtccatggcctctgtctgagcctcttttacccttcccgacgtaagcgagatggacatcccgttttctgcagccgtggaacaagagcgcttcaatttcccgtttacttcaacaatacaggtgtcacatgtttgaatcggatccacttccggtacatggcaaatttgcggaatctcaattccgttttggtttaaaatatctaaaatcttagacccctctggtgcttcatactccgtgccgtcaattttgacacggatagactgaacgtctgtcacttccaattcccctccatcttttaaactcgaaaaaagccatgcacatagataccggcctcctgtccggagaacggtataaatacgcatggcggaatagttcactagcaagtcttactaacagaccaatcctatttgtataaaacgatagactcataacacgtttcctattacaaatccatcttcactgcttttattataaggtgatatttattataatacaatacgaaaggaaaactttaaccaagtgaaatgtcacaaaggggaaccgggaatgtctttcataggctaaaatcggaggggacaatatgtctaaaaaaattcatgaatttaacgatattatccggaaattgcgcaaagaattatttggaaaggggcctgaacgaattcacaccgtttttgtggataacatggcggtatctacactttacggcaatctaagcgcaagtgagcagtttatcgcacgcacgcctgaaggaagagaaatggttcatgcggcgcgaaccagcttaattcaggagctgtattcaaaacaaacgcctgacggaatggaagagctcatcggagcaaagcttgtgcatctgttttcagatattaaaatagaggaaaatattgctgtatcggtgtttgtctttgaccgctcaattgaagagcataaagaagaaatcaaaagctgacaatattcaattgacacgaaattgtcacatttgatatgatatgaactgccagcagtggcctaaggacgattttttatggaatgtgtgcatgatctgtacatattctataccgcatattttcattctgcttgatattgttgtatgggtatgcatacaagttaggcagcattcaaaccccgttttttcagacgggttagttgaatgctgccttttttgttaggcgtctttggaaactgcgggctgaaatgataaatggaggggttattatggcttttcgtaaaccggacgaaatagcggagcttgcggtcgaatcaggggtaaaaaaggtgcattcaccgctttcagcactgattgtattaggatttttgggaggagcgtttatcgcactcggttatttgcttgatatccgtgtcatcggcgaccttccgaaagaatggggaagcctgtcgagtttaatcggggcgtccgtgtttcccatcggattggtgctcgtcgttcttgccggcgcggagctgattacgggaaatatgatgtcggtatccatggcgctgttttccagaagaatatccgccggtgcattggtgaaaaattgggtgatcgtgacgttgatgaatcttgtcggcgcactgtttgtcgcttactttttcggacatgttgtcggattaaccgaaacaggaccttacttggaaaaaacaattgcggtcgcacaaggcaaattggatatgccgtttggaaaagtcattgtttcggcgatcggctgtaactggcttgtctgtttggccgtctggctttctttcggggcagaagacggagccggaaaaatcgcgggtatatggtttcctattatggcgtttgtcgcaattggttttcagcacgttgtagccaatatgtttatcatcccggctgcgatatttgcaggctctttttcgtggggtgatctgattggcaatctcattccggcctttatcggcaatgtcatcggcggggcagtgtttgtcggccttatttattttattgcatattcaaaaaaagatcagaaaaagcaagggatgaaaagagtttcctgaggtaagaaagatgccggaaaacacggacaattgaagcggaatgccagcacattttccgtccaaatcttgaaaaaaatgtttacaaaatggaagctgatggatatacttacaaagtaagaaaaaagcaaagggaggttgaatcacatgacgacgttaaacggcaatcaaaatctacaattgaaccgattcagcctgtggaagagttcgtgtccttccttaacctctgcctgtcaagtacgttaatttcggagtatcaggacattcgcagctccccgcagggaaagaagcacagtcttcttttgtctgcggatttagtctgcccgcagcgcatatgaactttgctgcgggttattttcgcttgtgcggatattgaaagggggtgagcgataatgaccattaatcttttctttgtaacactgaccatttcaaagcgttttaaaagtgcggaagagtatgaacgagaacagcaggtcgaagagttttataatgaagcgaaagaacgccagctgaaacacttttatatgaactaacggacacgaagggccaaaacggaggagaaggaggagattatcatgttcagaattgaactgctgaatcattacacaatggagaaggaccaggtttagcgaggatgttgctgtcacgtcgcagacggcctgcataccatggtaaagaaagaaaaattggtaagcgggtgatagcatgcaaggcggtcagaacagaattccatccatcgggcacgggtatgcgtcaatgccccattcatttaagcacggctacggcaacccgtatcgccggcagagaatggcggcgctttcccggcagacaagatatatagcaccgtattattggtactagagcaggcggaaaacctacgttttccgtctttttttttatgaaaacaaatataaatttcaaataaatcgaaacgttcatgaagagaagtgcgtctagttagtacctcatactaatacgaggtaatattatttctgaataataaatcacaggaatggaaaagcgggtgttatacaatgttgcaacatacatcttcagcattaaaacgaatgcgcgcgaaatactttgctgcatcagaaccggcagagtcagtcattcagcaaatcttgatggacatacaggaatacgaccgcattttggaaatcgggaccggaaacggctcaatgtttaaacaaatcatcggacagcttgaaaagggcagtcttaaaagcatagaaacatcgaaacgtaaaatacggaaaacacagcgcgcaaaccgttcggttataaaagccgggctcggaaacattcagcaggggaggccggaaagcataccgttccgcgaccgcagctttcataaagtcttctcattacatactgctgaaacagtcagcgattaccggacggcatgtaaagaagtgtaccgcgttcttcaaattgacgggtgtttctatatggttttgaaaccttcgcggatgagtgaaaaggatgtgattgaggtgctctatgatcagcatttcagagacatttcagttgtcagcagagattcattccattttattactgccattaaatagaatatttcttgggaaataaaaagagctgcttaagtcactgcagctctttttgtgaaattgggcatatttccttatttttggttatttcacatatattttatattaaaaaaagtttttttcttatacaatggtaatcagatgaccgtacattttaaatattttgaacaaacggaatgaatattcattccgcgtttagaaagggggatgaaatgacagcttcaaataaggttgaactcattatgaaagcgtcgcttactttgtttacagatagaggatttgacgccacgacgattccgatgattgccgctcaggccgatgtcggaaccggcacaatttaccgttactttgacagtaaagagacacttgtgaacgtactgtatcaggaaagtgcgcagcgttttatgaaaaaagtcaaaacggactttcaggggatatctgtaagagaagggtttcatcacctgttttattgtctgattgattttacgaaggaaagtgagtatgcattgttttttcttgaaacgaataaggacgcctactttctgaatgaaacgagccgtaagcttcttgatgaaataacacagatgcttgacgtcttttttcagcgcggcaagtctgaaggcgtgctccgcaatctgccgtccaatgtgctgatagcgctgctgctcggggcatatctcaaactctatcagcttgtccggacgggaagcgtcgaaataacaaaaccgtttctgaaagaattggaacaatgttcttgggatgccatcagaactcattaattattcgccgaaggaaggaagatcgatatgaaacagctaagcgctataccgcagccgaaaacatacggacctctgaaaaatctccctcacttggaaaaagaaaaactgtcacaatcgctctggaaaattgccgaagaatacggcccgatctttcgttttgaatttccgagctctgtcggggtcttcgtatcaggccgcgagctcgcggcagaagtctgtgatgaaaagcgatttgacaaaaatctcagcaaagccctgctgaaagtccgtgagtttggcggtgacggactatttacgagctggactcacgaaaagaattggcagaaagcgcatcggattttattgccgagcttcagccagaaggcgatgaaaggctatcattcaatgatgctggatattgccatgcagctcgtgcagaagtggagcagattaaatccgaatgaagaaattgatgttgccgaagatatgacgcgcctgacgctggatacaatcggcctgtgcggatttcattaccgctttaacagcttttaccgcgacacacagcatccttttatcacaagtatgcttcgtgcgctgcaggaggcaatgcgccaatcgcagagacacagcctgcaggacaagctgatgatcaaaacgagacatcagttccagcaggatattgaagagatgaattcgcttgtagaccggatcatcgctgagcggagggaaaatccggatgagaatctgtctgaccttttagcattgatgcttgaagcgaaagaccctgtaacaggggaaaggctggatgatgaaaatatccgttatcaaatcattacctttttgatcgctgggcatgaaaccacaagcgggctgctttcttttgcgatatactgcctgctgaaaaataaagataaattgaaaaaagccgttcaggaagccgagcgggtgctgacgggagagacccctgaatataagcagattcagcagctgacatatatccgcatggtgctaaatgagactttgcggctgtatccgactgccccggcattttctctgtacgcgaaggaagatacggttctcggcgggaaatatccgattgcgaagggacagccggtgacgattctgactccgcagctgcaccgggataaaagcgcgtggggagaagatgccgagttattccgtccggaaaggttcagtgatcccgcggcaattccggctgatgcgtataagccgttcggaaacggacagcgcgcatgcatcgggatgcagtttgccctgcaggaagcgacaatggtgctcggccttgtcctgaaacattttgaactgattgatcatactgattatgagcttacgattaaagaagctctaaccattaagcccggtgattttaaaatccgtgtgaaaaacaaggacgtgtccaatcatcagcccgtacaaaaccataaagctgaaggcagcggtcacaaagaagaaacgaaagaaatcccgtcccacggaacgccgcttctcattctttacggttcaaatttgggaactgcggaaggaatcgcggaagagctggctgatatcggaagaagcaaaggattttcaactgaaaccggcccgctcgatgattatgccgggaaactgcctgtaaaaggcgcggtcgttattgttacggcttcttataacggggcgccgcctgataatgcagcgggttttgtgaaatggatggaaacccttgaagatcaggaattaaagggtgtttcttacgccgtcttcggctgcggagaccgcaactgggccgccacttaccaaaggatcccccgcctgatagacaaagtgcttgaagaaaaaggggcaaaacggctgacctctatcggggagggcgacaatgccgatgattttgagtacagtcaggaagcctgggaagactcattctggaaggacatcatgaaggcttttcatatagaggccgctccaaaacagacaaacaaatcacagttatcaatcgaatacgtaagtgaagcagccgagacgccgattgccaaaacgtacaaagcatttgaggcggaggtcatcacgaacaaagagcttcataccgaaagcagcaagcgctcagtccggcatattgagctgcgtctccccgaaacagaaacgtatcaggaaggagatcatctcggggtgcttccgcaaaacagcggggaactgatcagccgtgtcattcgccgattcggtcttgatccgaaccagcactttaagatcaagggccggcagctgcctcatctgccgatggaccggccggttaatgcgccggagcttttggcgtcctatgtagagctgcaggagccggcaacgagagcccagcttcgcgaacttgccgcacataccgtgtgcccgccgcaccaaaaagaattggagcatctttattctgatgatgcggcatataaagaaaacgtgctgaaaaaacgaatgaccatgctggacctgctggaagattatcctgcatgtgaactgccgtttgagcgctttttagaacttctgccgtccttaaaggcgcgctattattcaatctcaagctcaccgaaggcaaccagcggggagctcagtatcacggtcggcgttgtgacggctccggcatggagcggccgtggggaataccggggcgtggcttcgaactatttagccggattacaaaaaggcgattctgccgtctgtttcatccgctcgccgcagtcgggtttcgcattgcctgaaaatccgaaaacgcctctcattatggtcggagcaggcacaggaattgcgccgttcaggggatttatccaggcgcgggctgccgaaaaaatgtccggtaacagcctgggtgaagctcatttatacttcggctgccggcatcctgaagaagacgatctgtacaaagatgaattcgaccatgcggagaaaaacggccttgtcaccgtgcatcgggcgtattccaggttagatcaggactgtaaagtatatgtacaggatgttctgcttcgcgaggctgcacaaattattgcccttcttgaccaaggcggccatctctatatatgcggtgacggaagcaaaatggctccggctgtcgaaaatgtactgcttcaggcgtatgaaaaggtgcataacaccgattcaaaagtttccttggagtggcttgaacagctgcaggcggaaggaagatatgcgaaagatgtttgggcaggtatgtaacagaagagtgagacaactgaagaatgttttttaattgaagaaagccggcacgatatttgaaatctactgaatcaaaaggaatagttatagggagtatcgtgccggccttatctttagtatcggacaaaaggcacaaatctttaatgtttttattgatttacatgcaggcggctatgtcccttttttctgaattccgccagaaataaaaccggataagacagcaatagcaaaaccgaaataaatgaaatgataccgatccaatgaaaatgcgtccaaaagaaaccgccgcaagacccggccacgcttgaaccgatatagtatgcaagcagatataatgaagaggcttgcgcgcgctgatcaccggctgcgcggccgacccaggcgcttgcgatcgaatgagcgccgaaaaagccgaaggtaaagacggcaatccccgcgattttgagcgcaagctggggcaaaagtgtcaccgctgcgccggcaagcataacaaaaatcgcaatcttaatcatttttccgcttccgaaaagatctgcttttttccccatatagaccgagctgaacgttcccgcgagatagacaataaaaataaaaccgatcacagtctgcgacaaatgataaggagccgccattaaatgaaagccgatataattatataatgtcacaaaactccccattaatataaatcccagagatattaacaaaagcagccgtttgcggtgcaggaccgctccgtattccttacatgccgcttttacgcccgcatgccgctgagatgaatggcgcggagccggaagaaaacgccaaaacaaatagcttaatacaatagaaagaatgccgatgatggcaagcgccggccgccagccgaatacatcggtcagaagccccgttaacagcctgccgctcattcccccgatgcttgtgccgctgatatacaagcccatcattttcccgaggcccttcggatcaaactcctcgcctacatatgtcatagcgacagccggaactcctgccaggaaaataccgagcagcgccctcatcgccaaaagcgccggaaaggccggactgaacgctgttaatagacctaaaacagaagtagctgttaacgacagcaccattaatttttttctgccgaatccgtcagacaacgaagcggcggccaataatgaaaatgccaaaacggctgttgagatggataaagttaagctggcagccgcagcggaaatatgaaactcttccgaaaacaaaggcataagcggctgtgtcgtgtaaagcgtggcgaaggtcacaaagccgctgataaacagagccaagctggcctttctgtaagcctttgtgtgaggctgaataaacgtcatgaatgtccctcttttctcactgttggttatatatgtatcgtacgcttttcatttcaatgtgtctaatttataataactatagaattaatgcgtgtaggttatgaagaaaggggagaaggagaaaatggagcttcatcaaattgacaacttcattgcggcggcagctcatcagcatttcacaaatgcggcaaaagaaagaatgatttctcagccggcattaagccgatcgattatcaggctcgaagaagaattaggcgcgccgttattttacagagagacaaaagccgtccggctgacaaggcacggagagcagttcttaataaaagcaaaacaagcgagacgagctttaaatgaaggcgttgaacaagtgaaaaagaatatgagcctggagcacggcgaaatatctgtatcttttcttcatacgctcgggctgcgcttaatgcctcagctgattgccgaatttaaaaagctatacccaaacgtgaccttccggctttatcaaggcgcaaatgaaacgcttcgcaaaatggtggaaacgggagatgcggatatctgtctcagctctccgccgcttcccagcgagcttttacaatggacagtgctggagaaagagcctctttatgcggtgctacctgagaaccacccgcttgcaggaaataaaagcattcaaatgaaagagatgcaggacgaggattttgtgggttttaaaccgggatacgggctgaggtatatgtttgatctgatgtgccgggatttgaatatacacccgcatctcgcatttgaaggagaggaagtgtcaaccatattaggactgaccgccgcgggtctgggggctgcagtgctgccgaaaaccgcggagcattcatactttccggtcgtttttcttccggttgcagattaccaatgcgaacgcaccatagcgttagcccagctgaaaaaccatgctctctctcccgctgctgagcgttttaaacagtttgcacttgagtattacaaagcacgcaactgagcggtcattttattaaaatcaaagttgaaaataaagcagaaagaaatacagaaaacggaggaaaaccatggcgaaaaaaacagtgaaaacaaatgctgtccgtatcattgagcagcaaaacattccctatgagctattaggttacaaaacagaagggggacagcccgcagacggtctttccgtttcacaaaaaatcggatacgctgccgaatatgtttataaaaccttagtggcatctgcaggaactgatcattattacgtctttgtcgttcccgttgcaaaagaactgaatctgaaaaaggctgcgaaggcggcaggtgagaagaaaatagaaatgattgccatgaaggaccttttgggagtgaccggctatatacgcggcggctgctctccgatcggaatgaaaaaaaggtttccgacttttattgatagatccgctgaaacactggagtttatgattgtcagtgcggggaaaatcggaatgcagctgaaagcagcgcctcgagatttagccgaagcaagcggggcggtatttacagacattgtataaatgtccggtgaatctaatggaatacacgtttcaagggagaatgataatgaaaaaaagatatgaaaacttgaatggcgtgaagaatgaacatggattcagggacatgtggaaatggatgaaagaacgaagagaaaaaagtaaagacttaagcgagaacattccgaaagcggtcacaagggatgtccgtgatgttgccgtcaatcggacggaaaccgccataacatggatcggccattcttcatttctgatccaaatacaggggtttaacataatgaccgaccctgtatgggcgcggaggatgggttttcaaaaacggctgacagagccgggatatgaattgagcgaactgcctgacattgatgccgtgctcatctcacatgggcattatgaccatcttgattttccgagtataaaaaaactgagaggaaacccggatttttacgtgcctgcgggactgaaaaagctgttcaacaaaaaagaccgcaaaaaggtccatgaaatgaattggtgggatcgttttgagatgcggggggtgaacatatcatttgttccggcccagcactggacacggagaacgctttgggataccgatacctctcattggggaggctgggtcatagaaagcaaaaacggcgagtccatctattttgcaggagatacaggctattttgaaggctttaaagaaatcggagagaggtttcgtattaaggcggctctgatgccgatcggagcatacgaaccggaatggtttatgcaagtgtcacatatcaatccggaagacgccgtgaaagcgtttttggagctgaaggctgacagcttcattcccatgcattacggggcattccggcttgctgatgatacaggcccggaagcactaagcagactgcacggcgagtgggatcggcttgcattacctcctgaaaacctgaaagcattagcgcttggcgaaacattttggctgtaacagcaggttttcgctgccgacaccaatcgtttaaaaacggttggtgttttgttgtcaaccaaaggtgaacagctttagtataaaacatgatttttccggaatctgcggtaaaaaacaaaactttttactcttttgtttcattataaaatgaaaacggtttcgtatgtgtagtatatttaacctatcacaattgctccagcagaaacggacaggaaggatagaaaaacagatgaaatacatgaattcaaggcagaaaaagattttgtatctgttgttatctgaacctgatgactacttagttgtgcaagatttcgcagacagggtccgctgttctgaaaaaacgatcaggaatgatttgaaaacgattgaagatttcctgaatgaacatgctcaagctcagctgatccgcaaaccgggattaggcgtctatttacatatatctgaacaggaaaggtcacggttaatccggcaaatttataatgagcactttacgtgcaggcacaagaccgatgaagaaagaatacttcacatcgcttatgatttattaatgaattcaaagcccgtttccgcaaaagaaattgccgcacagcattttgtaaacagagcttccattaaaaaggatgtaagtgcggttgaagagtggctgaagcgatttgatctcacgctggtttctaaacagcggctcggcttaaagattgaaggggacgaaaaaaacaaaagaaaagcattggcgcgaatttcagatttgattgataatgcggaatttacaagccaatttataaaaagtaagtttttaagttatgaagcggactttgtgagaaaagaaatcaagttattacaaaaaaaacattctatctattttacggatgaaacatttgaaagtttgctgctgcatacattgctgactatccgccgtatcaaaatgaaacagccggtcgccatttctgcaagacagctggacgcggtaaaaaagaagaaagaatatgaatggacactggcttgtttaaaacggcttgagccggtatttgccatccggtttcctgaggaagaagccgtctatttaactttacatataataggcgggaaagtccgctatccatcgcagcaagaaaagaagcttgatcttgaagattctgagctttccaaagtcgtcaggcatttgatcaatcgtgtttcagaactgcaaatgctggatttttataaagaccaggaactgatcaacggattgaacattcatctcgatccggtgttgaagcggctgagctatgatctctctgtttcaaaccccatgcttcacgacatcaagaaaatgtacccttatttgtttcatcttatcatagacgttttagaagacatcaatcaaacatttgatctttatattcctgaagaagaggcggcctatttgacgctgcattttcaggcagcgatcgaacggctgcgccgaaacagtcataaccctaaaaggacgatcatcgtctgccatatgggcattggcatgtcgcaattgctgcggactaaaattgaacgcaaatttcatcacattacggtaaaagactgtatcgcaaaagcggagctgacagagtatatcaaaaagcataaagatatagatttcgtcatttctacgatagggcttggaaatgtaacgatccctcatattgtcgtatcaccgcttttggagtctgctgatgaaaagaagctcagcgcatttctgcaacagcttgatacatcacaccgccgggagcaaaaaacgtttaaaatgctgaacgatacgactccgtttctcgtttttttacagcaagagacagagcaccgttatcaggtcattgaaaagctggcgcaggctttgtatgaaaaaggctatgtagaaaaagagtatggcattcatgcagtaatgagagaaaaaatgtcggcgacaaatatcggggcgggtattgccatccctcacgcgaactctaaatatatcaaacaatcagccattgcaatcgccaccttaaaagagccgattgaatgggggacagaaaaggtgtcgctcgtttttatgcttgccgttaaacacgaagatcaaaacaaggtaaagcaattattcagtgagctttcctatcttagcgagcagccggtatttattcaaaaactgacggaagaaaaaaatgtgatgacgtttttatcgtatttaaactattaaaagcagggaatatctccctgctttttttctgtttatagggaaaaatgccgttatttccggaacttatggtaaaaaaacgcgcttatcacaggctgatttcagtataaagttgagacaagatcttgaaattcagactgcaaaggaggatttatatgaaactgttagcgattacatcatgtccgaacggcattgcccatacgtatatggctgctgaaaatttacaaaaagcagccggcagattaggcgttgagatcaaagtggaaacccaaggcggaatcggggtggaaaataggctgaccgaagaggaaatccgggaagcagacgcaatcattatcgcggcggaccgctcggtgaacaaagaccgattcgcgggaaaaaagctgctggccgtcggggttcaggaaggcatccgcaaaccggaagaattaattcaaaaagcgcttagcggtgaagtgccggtctatcaatctgcttcaaaagctgaatccgcaagtcagcagggcaaaaaacaaaacccgatttaccgtcatttaatgaacggcgtttcttttatggttcctttcattgtcgtcggcggattattgatagcggttgcattgacgcttggaggagaaaaaacaccaaaggggttagtcattccggacgagtctttttggaaaacgattgaacagatcggcagtgcttctttttcattcatgatcccgattttagccgggtacatcgcgttcagcatcgctgataagccgggtcttgtccccggaatgatcggcggatatattgcggcatccggcagcttttacgacagtgcaagcggcgcaggatttcttggaggaatcattgcgggatttttggcgggatatgcggcgcttggaatcaaaaaatgtaaagttcctaaagcaatacagccgattatgccgatcattattattccggtgtttgcctcactgatcgtcggtttggcgtttgtctttctgatcggcgcccccgtcgctcatattttcgcatcattaacggtttggcttgcgggaatgaaaggttcgagctcaattcttctggcattgattttaggagcgatgatctcctttgatatgggaggacccgtaaacaaggtggcctttcttttcggatcggcaatgatcggagaaggaaattatgaaatcatgggcccgattgccgtttccatttgtataccgccgatagggcttgggattgcaacgtttttaggaaaaagaaaattcgccgccgcagaaagagaaatgggaaaagcatcatttacgatgggccttttcggtatcacggaaggagccattccatttgcggcccaagacccccttcgtgtgatcccgagtattatggcgggttctatgaccggatcggtgatagcgatgatcggccatgtgggggacagagtggcacacggcggccccatcgttgctgtacttggagcagtagatcatgtactgatgttttttatcgctgtaacagcaggctctcttgtcaccgctctgttggttaatgtactgaagaaagatatggcgaaatcccccgcgcccggcgaggtgctgcagtctgccgcaccaaatgaagctgcagcggcaaaagaaacaaaggaaccatctcaggctgacagccgaaaagccgggatgaccgaaatcaaaaaactgactgacattatcagtacggacttgattgaaccgcatttatccggcgaaacgagggatgacattgtcgacgaaatgatcgagaaaatgtcccgtaaaggtatgctgctgtctgacagcggatttaagcaggccattttgagccgggaacagcagggaaccacggcgataggtatgaatatcgccattccgcacggaaagtctgaagccgtcaaaacgccgggtgtcgcattcggaataagacgctcgggtgttgactggaacagccttgatggttctgatgcaaaactgatttttatgattgccgtaccgaaggaaagcggcggaaatcagcatctgaaaatattgcagatgttatcccgaaaactgatggatgacagctatcgggaaaggctgctctccgttcagacaaaagaagaggcgtatgagcttctggaagaaatcgaataaagcgggggatgatcatgtctactgaaccgatatttttcaatccggttttcaaagaaagaatttggggaggcgccgccctgcgtgattttcactataatattccgtccgagcggacaggggagtgctgggccttcgccgctcatcaaaatggacagagcacagttcaaaacggcatgtataaaggatgtacgctcggtgaattgtgggagcatcacagagatttattcggaaaccttgaaggagaccgttttcctcttcttacaaaaattttggacgcggaccaagacctgtccgttcaggtgcatccgaatgatgactttgccaaaatgcatgaaaacggggaacttggaaaaaccgaatgctggtatatcattgattgtgcaaaagatgcggagatcattttcggccacaacgcaacaacaaaagaagaactgatatccatgattgagcgcggagaatggggcgggctcctgaacagagttaaggtaaagccgggagatttcttctttgtcccaagcggcaccgttcacgcgattggaaagggcacacttattttagagacgcagcaaaattcagatacgacttacagattgtatgattacggaagaaaagatgcggacggcaggctgcgcgagctccatttggaaaaaagtatagaagtgatagaagttccctctgtccgtgaacggccgaccgttcaatataaacaaacagatgatctgctggcagctgttttaatagaatgtccttatttttcagtcgaaaagtgggttgtaaaaggtgaagcaaatctattccagcatcatcccttccttcttgtcagcgtgatcgaaggagacggaataatgagtgcaggcggacatgaatatccctttagaaaaggagatcatattctcctgccttccggtttgggagaatataaactggcaggccatgcaaattgtattgtgtctcatctgtgatcctcaaaacccttctctagcatcagagaagggttttttattatttttacaaaaaggacggaatttccagtgtatcagtgttttcgttcctgaatttattctctcaatttgtatatctcccgagccattgattcaagtatgtacatagcggggatttgggtggtgacattcgcattttcaacccattcttccgtcacgtaatatgaaatattcacatcggacattttggcaatggttgaatgtttatgatttgtaatactgatgacctggctgccttcttgtttcagctgattcagatgagtcaccgtagaatctccttcacctgaaaccgataatgcgattgtgatgctgttatgacggaaatgggaatgggccggaaagtaaggatctttaatatacatgaaagtttccctaagcacgaaaaatatctggccccgtattcggcgagaattcctgaacttcccactccgataaaaatgacgctttctgcatcggccgcaagggctgctgcttccttcagcttttcttccatctctccgcttactgttctttcaaaaaactcggcaacggaatgatggggactctttaaaatcgtttttttatttgcctccgtatacattttcagcttcaccttaaactccgaaaacccttcacagtttatttttttgcagaaacgtaaaatagaagccgtagatacatgggtttcatttgccaattcacggattcgcatatagacgactttctcgctattttgggagatgtagttgtataaagaagtttcaagctcgttaaatgaagcaatcatttcgtgtgtgaacatgcagggggattctcctttttatgagaatggtgaatgtacatctaatcgtaacatatcatttttaaaagaaacatagtgttatatttatgtgacaaatcactttttgtgtcattcaaaacaagacgtcagccaatgatttacggcgcaaaacaactgcggatataattcgttcatacgctttatgcttgatctcttcaagggtctctgacaaaagcggccgaaaaaaggaggacaatatgagtatcaaactgatagcggttgatatggacggaacgtttttgaatgatgaaatggcatataataaagagcgttttatgaatcagtatcgtgaattaaaatcgcgggggattaaatttgccgtagcaagcggaaaccaatatgcgcagcttacatccttctttccggaaatcaaaagtgaaatcgctttcgttgctgagaatggcgctttcgtcgtgaatgccggagaagaattattcgcgggtagcatgtctgaaaacactataaaagcagtgatccttgctttagagcagtatgaggtgaaaaacgtcattgtctgcggaaaaaaaagcgcgtatattcatgaaaaggccggtgaagatgaatatctgcatgccagtaagtattattatgtgttaaaaagggtgccgcattttgaaaacatcgatgatgacattttaaaattttccatcagctttcccgccgaacattgttccgcacttctgagccatttgaaaaacgccatcgggtctttcgtcacgcctgtatcaagcgggcacggtgacatagatctgatcataccggggcttcataaagcaagcgggattaagcttctccagaaacaatgggggatgggtgatgaagagtgtgcggccttcggagacagcggcaatgatctggagatggtgtccgccgtgaaatacggggtcgccatggataatgcgcaggcaagcattaaacaggctgcggcgcatatcacgcaatcaaacaatgaagaaggggtcttaaatgcgattgattccatcctcaaatgtgaaaaaccctttgtctgaaaaagacattttaactgcggaggtgctgaacgatgattaaattagtgattacggatttagacggcacatttttaaataatcaaggcgattttgacagaacgttatttgaaaagacaaaacgagtaatggaggaacagcatgtcgctttcgccatctgcaccgggaaacagtgtgaaagggtggaagccttattcggagaagacgcgaaagatttttggattttaggagacagtgccgcacgtatgaaaaagagcggcaagttcgtatatgaatctttgatcagcaataaagccggactgtcaattataggcgctttagaaaaaatcagctgcgggcacaccattatcgcgtgcacaaaaaaaggcgcgatcgtaaaagaaaatctgtctgaaagtgaaatgaaatatgtaaatgcctcttatgcacatgtaacgaaaataactgattttactgagataaaagacgattttatcaagattacggttcatgaccccgacgccaactgtccggaaacgagagaaaagctgcatgaattttttcaccaattatatatcgtagcatcagaggatacctggatggacatatcaaatatcggaatacataaaggatcaacagtacaagaactgcagcgattattaggggtttcggctgatgaaacaatggcgttcggagacggccgcaatgacaaagaattgatggaagcggcatcctacagctttgcggttaagaatgccattgacgaaataaaagatgcggcgcactttgtcatcaaatcaaatgaggaaagcagcgtcatgcacacgattatgagaatattagcgctgcaaaaacaatgatgggctaaaatcaatgcggcatgacttactagggatagaaaaagcgggctatcctcagactttaattcactcctgattttcctaaagtatgttaaaaatgaataaatatctatatttgactcgatggtattggtataatatgtataaaatgaatgaagcggtgtaatatcaagatgaaaaaaatcacttcatatcagacaaaaagtaggaactgcctcgttttgaaattgggaggtgtttgtattagcccgctgttgagccccgcgtatatcattcttatttttcttccggcagcttcttttctgttagggattttaggatatttcatctttaaaaaagtatggatgatggttgttattgtcttcattttgtccttgatattcatgtttattgtaataggtgccgaaccgacatttttcatttgggtggctatgatgacggggagctgttttgtctccggttcaatcactaagacgatatggacttttgcaaagagaaaatattagacagaagaatcctgtttgaacagctatcctttttttgtcgattgaagaaaaagaagtatagaggtatccgttatgttcttatattttgtctgttgttgtcagttcgggctttctgttaaaaatgtctgtctatcgttttgttcttttttaactaaacggagcactataattgaactgcagatacatagaaaaacaaaaaaggataaggaggatttttatgtttcaaactttagaccattttttgaaatcttgggaattcgaagccgatgcgacacaaaaactgctgaatcatctgactgatgaatcacttaaacaagaaatcacttcagaacattggactttaggccgtattgcttggcatactgtcgctgccattcacatcattacctcaaacacagatttaacgtttcacgctccggccgaagattatcctgttcctgcatcggcgcggtttattgctgagagttatcatcaagccagtaatgcatttgtacaggcgttaaaaacgcaatggactgacgatacacttcaagaatgtgtcaactttattggtcagcaattgccaaatggttcacttttgatgtttttaattcaacatcaaaaccatcatcgaggacaaatgactgtccttatgagacaagcaggtttacctgttccgggtatttacggtccggcaaaagaggaatggattaaattcggtttggaagctccgaaataggatattgttgtaagggctcgaaagaatagatgataccaatcgatgttggtatcttttttgttttagtcttagagtgattaaaccggtatccatgacatgcagacgaatcaacagttcaatagatgtaaattaaggtcaataaatgcagaaaggtgattatgatgataactaaaatgacgcgattcaatatgaaagacttcaataaaccaaacgaacctttcgtagtttcagggagaatcatcccttcatttgaggacaatgtttggacatatacagaggagaaatttgctgagccttatgtcaaaaaatatgacgatgaagacattgatgtcagttatattgaagaagaggataaagttgtctttttttattacgcagagaacgactgtgtcggccggagtaagcttcgttctaattggaatggatacgcactgattgaagacattgccgttgcaaaagattatagaaaaaatggtgtcgggacggctttattgcataaagtgattgagtgggcaaaggagaatcatttatgcggtcttatgcttgaaacacaagatattaatgtttcagcttgtcatttttatgccaaaaataactttgtcataggagcggtcgatacaatgctttattccaatttttcaacagcaaatgaaattgcggttttttggtactgtaaattttaaatataacagtatttgatgtttcgtcatttgcgggtgtgtgtcgcaaagcattcaaaacatcggcttgaggatttataataaggtatatcaatcaatgcagggggagttatgtatgaagtgcaaaaaaatgaacagggtccaattaaaagagggaagcgtatcaatggccctataaactgcgtctgccctcattaatggagggaaatttgtgaatacgccttattcacagtcagctttacggcacaaccaagtgttcatttggctttgtgttctgtcatttttcagcgcattaaatgaaatggttttgaacgtatcattacctgatatcgccaacgattttcataaactgccagcgagtgcaaactgggtgaacacggcctttatgttaaccttttccatcggaactgctctgtatggaaagttatcagatcagctggggatcaaaaagctgctcctatttggaattatggtaaatggcttcgggtcgatcatcggatttgtcggacactctgtctttcctgtactcattctggcccgatttattcaaggggctggtgcagccgcattcccggctcttgtgatggttgcagtagtacgctatattccgaaagaaaacaggggtaaagcatttggtctgatcgggtcgctggtggcaatgggggaaggtgccggaccagctattggcggaatgatcgctcattatattcactggtcatatttgctgcttattccgacagcaacagttatcaccgttccattcctgatgaaactgctggaaaaggaagaaagaatcagcgggcgctttgatatggcggggattatattaatgtctgcaggcatcgtattttttctgctgtttacaacgtcatatagaatgtcttttctgatcatcagtattctagctttcctgatatttgtgaaacatattaggaaaactcaagatccctttgttgaccctgcgctggggaaaaatgccttgtttatgatgggcgccctttgcggaggcctgatattcggcactgcagcaggatttgtgtctatggttccttatatgatgaaagatgttcaccatttaagtactgcggcaattggaagcgggattatgtttcccgggacgatgagcgtcatcatcttcggttacattggaggatggcttgttgatcggaaaggttctttatatgtgctgaccattgggattgtattaatgtcttccagctttttaatcgatgcctttttcatagatgcggcaccttggctcatgaccgttatcatcgtttttgtttttggggggctctccttcacaaaaacggttatatctacaattgtgtctggcagtttgaaacaaaaggaagccggcgccggaatgagtctgcttaattttacgagctttttatcagagggaacaggcattgcaattgcaggcggtttattatcgatccgcttgctggatcaaaggctgctgcctgttaatgctgatcattccgcttatttgtacagtaatatgctcattctttttgcaggaatcgttgttatgagctggctggtaaccatgaatgtctataaacgttcgcaaagaaatgactaaaaagggaaaaggatcaaacttgataaaagttttgatccttttttgaggagattccttattccggaagcttttgtcgatcaatgaaaggggagttcactgccaatcgggacttttgagaaagtgtttgaggatattaaaataggccggagagaaagttaatcattctgtttgaaaatgaccatgaagttcgtaagcagtatggttttaacacgcatctggattcccctgacaaagtaaaggtttttggggatttatgttaaaataatagtaagaaccttgtgcagcggacagggagtttcgttgcttcataaggagagggatctatgaaaaataagattcacatactgggagcctccggagtcggaacttcaacattgggagttgcattatcaaagcatttgcctcatacgcatcttgatactgatgattactattggacagataaattcactaaaaaaagagaaatttctgaaaggagagagttgcttgaaaaagacttgacaataaatgagaaatggattctttctggcgcagtgtgcggctggggcgatgatctaaaaagttattttgaccttgtcatcttcttatggattccgcaggatatacggcttgagaggttaaggcatagggaatttcagcgttatggaaacgaagtgttagccggcggcagtaaatatgaacaatcaaaaacatttttagagtgggcttctttatatgataatgccggaatggaagttagaagcaaagctttacacgaatattggatggcagatttatcttgtccattgctaaaaattgaaggagattactcagtaaatgaaagagttgatcgtgtcttggattatctgaattttaattaaactaacggatggagataactgcaaaatccaaaattcaaagacagttccggccattttaacggagctgtttttttataccgctttctgtttctctgttgtgaagtgatttattttcggcagcatcctacaatagagaagtgatttgttcttcgtgaggaagtttttggttaagttgcaagaaacggaactccaatgaatagatacaccctgaaacctgtccagccagcgtttaagctggttaccattgagtgaaaagcaattgccgccggcaaagacaatacctggaatgaaaagtattgcagggaaagctaatttggtcatttaccgtgaaaatacggaaggcttttacgctggccgaaatatgtatggcaggtaaccctggaagtggctgtattgactggagttttcactaaaaaggcgattacacgtattgcgcatgcagcctttcaaagtgcgatggaacgccgtaagaaggttacatggctcgggactctttttgaatacgtgccgagaaatgccggaacaataccctgaagtggatgattatcatattgatgcaatgacggtacatttagttcgtcggcagcttggggcttgcactgtcaattaatacaaatgggaaagcaggcaatggcctaggctgctcacggttcggcacctgacattgcagggaaaatattgcgaatcctatcggtattatactttcaactgctatgttgtttgaatgctcagtacacagtatcgtgataaaaaactgaaagaagcagcggaattaatagaaaactcacttcgggaaaccgtgaaggcaggaatcaaaatgggagatcttagcggtcaatcatcaacgtcagactttgcagaagcaattgcagaaaggatcggatgttaaggcggaaaataagaggtgagaagcagatcatcaaaacgcaataggacacctcaatttagattttcagtaagaacggctctgctcattaaaaaactcaattcgtagattaatggcatcaataatgctgcagatcgggttagtaacttaaagaggaagggatgagaccccttccttaacaccttcaattcctctaatttcattgtaagatatattacttttttgaaatgggtatccaaatttcacttttaaaagatggcgatgttacatctttatgctcattccacaggatttctgggccttcaatttgttcataatgtgacgatggaaaccattcagaataaatccgcccccatacttcctgcagtgcatccggaaatgatccggctgcttcgaatacagcccacgttgaggcagggacttcaagctgtgataggtgatttgggcaatgtttcgttgtggctgcgccaatatagtgatcaagctcaccgttttcctctgtccggccttcagaaaagttcgtggatgcactgatgagtcctacaggcgctacattagaaagctcttttagttgtttgattgctgtttcatctaaactttcccacatcgatgcaatgtcaggattcacgcctttgaataaaatagggactctttttttaatgccgacgatgcgaaatgcctttttttcttcaatgcgatagttcatttcatttcctcctttgattgataactggaaggtcattcgcggataagctttaagtgaatggccattatgtttagctgctgatgggcttatgccatgcagattttgaaatgctcgtgcaaaagaatctggtgagtgataaccgtattttattgcaagatcaatcacctttacgctgctgtctttaagttcaaaagctgcaagagtaagacgtcgtcgacgaatatattccgataatgaaatacctgtaaggaaggaaaacatccttttaaaatgatattcagagcagaaagcaagccttgctgcttctttgaaatcaatatcgttcgtgaggttttcttcaatatacgttaatgcgctattcatccttttaagcgaatccatttatttgacctcctttaacaaaagaataacaggagcgaaatgtatctgcccgacatttcgtgcacagttttgcaggataacttatatgtaataaattaagtgattcacctgtatttgtacagataaagaaaaccacctaataactgcttgggtttcataagatgaaagaagttatcattgttttatattgaaaagaaaacagaaaaagacggagttttcttgttggaggggtttactatcaatcaattgaaagttgcttacgcagaggtagataaaatgtcgagaacggtgttcaccttcactgcttgttcaattagaggaagtgattcttccttaagggagatcactttttcttattcgacgaaagcagcagtttagcggaagatggagaaaaatcagttgacttacttgaatactaaataggtgtaaaaagtggttattcatacggattgaaaaagaagaacacgcagcagattcacttgctcttgtttggggcaagtgttgacaaccccattactggtttaattaaaagaaggggtataaaacctgtatcaatggtgttactcgatatctgcgacacaggttttatatgcaggtaactaatattcctatatatgtaacattgcattttttattatgcaatagttcactctatttctgctttcaatttttcgaaccactctaaattaaccaagtgatgtgaacgggaattttcattcatgcggcgaaagtaattgattgtgccgggaatttcttgagtgatggacaggtattcgtcaaggagctcgattcgagttttagtctgatcgatttgtgattggatcagatccagtaatttatttttgtcgaattcatcggcaaagagtaacgccccataaaattgcaggttcacatattccgatttagtgccgtatttgatcattaatttctcgaattctgcccttcccgattctgtgacgttaaagttacggatttcacgcccgctggttgagggtttctgctgaatctgttcaatcaaacacttttcttcaagttgctgcagattgtaataaaatgaacctttcgtgaagttaacgatgtacttgtaatgacgtttttccattaaggccagaagttcatagccgtgagctccggggttttggatgagcaagccaaggataagtaagggaatcatggtttcatcaccttcgccatccgcgcctcaaattccgcgtacgtgattttacccgaagccaaatccatactatgaaggtaaatctgttctgttttagaatagtcaccattcactttcagtgattgctcctctcccgaaatgggtttcaggatatggtgctttttcgaaaaagcctcgaaatagcgataaccgaatttgcgttgtgaagctgcgtctaaatgaatgccatcaggattcgcagtcaaacctgccgcagtaacaaaataacaattctgttgttcattagcaaaacgcagcaattgttcattaacctgtcgaaattcagtcgcgtgctgtccaaaaccagtcttcccaagaaagtcaccaagccctccaataatcaacggtagctcatctaattccaactcgtttcttagcgtctcgatgataagagttaatttctcgtaataagtttcatgcagcgaacgataactgtcactctcaccttgatgccaaaggattccacaaatttgactggatcggagggcgaagcgggcttcggacaaagcatgctgaaaaaggatgccttccggatgccagtcattcaatgaactgccgccttccgcacacgggatcaagccaatttcttcatcgggatgagctttcgaccatgcatctgcaaaagatgcggccaggccaacgcctgaaaccggacggtcgtaattaatcggctctgtcatcatctgccactgtccattgcgcagcattttaattttttcattatagatagggtctacttcattcaaaaatccacggcccgccatattcgactgccccaacattaaaaaagactttatcatctaatttttcacttctttacatcaatattttagtctaattagactatagtccattcagcttgtcttgtaaagtttcaactaggttttatttttattattagtatgtatgaaaaacaaactaacattgaaaatttggtggatgtatttgagaattagcaagttcttttgctttaggtcttgataaacaatgaaaaaacaacaaaaaccctgtcatgtaagggttcctatgaggttcaaaatcatttttcataggaaatacattcaatgatgggggtgtagcccaaatgaaatggattgttaaaaagagagggctatgttgaaggggttaaatatcaataaaaaattattaaaaaggttaacgattgtaccaattctattcatttgttatgttttatttttaaatcctgaagttatacttgaagagcaatgtcctaaaatgcagaaaaagccgggatgtcagatccggcttttcgctcactttcccttcttcttccgcttctccttctccgcccgataaaactcatgaaacatcttcatcaatgcgcgtttttcaatccgcgacacataactccttgaaatgccgagctcctttgcgatctcgcgctgcgttttttctttttttaaatcaagcccgaagcggccgacgatgacttctttttcgcggtcgtctaaaatatcgatatattttttgaccttttcaagttccatgttgagctgaatggtgtcgatcacatcttcgctttccgacttgaggacatcgatcaggcttatttcattcccttctttatcctggccgatcggatcatgaagggagacgtcttttttcgtttttttcaatgcgcgcagatgcattaaaatctcattctcaatacatcgtgcggcatatgtggcaagcttcgtgccttttccggctgagtagctttcaattcctttaatcagcccgattgtaccgatggagatcagatcttccgcgtcctctcccgtgttttcgaattttttcacaatatgggcgactaaacggagattatgttcgatcagcatgttgcgggcgtgttcatctccttcagccataaggtctaagtattttttctcctcattatttgagagcggttgtggaaaggcattatttttcacgtatgatactaagaacacaagttctttcacaataaacccgagcgctgcaaaaacacctgtcaccgtcctcacctccacaaagttatgtaggcaatcgcctatatgtaactgtatgtggaggtagggctgtttgtgtctgtacagggaaattaatcaaaatcgggttttatttcttacagcctcttgatttttgatgattgagcctgtatattttttaaaaaagtaagggtgaaaacaatataaccgaaaagcgctgaagagacgagtagacagatatcattcatgacagagagctccgggagctgtgaaggagtatgaatggatgtgttgaaacaaacctcttagcttcgcatcggaatcatgcaacccgacgatgatgcggcggatactcctgttaccgagtaagctttgtacccggcaaggccggcaccaaaccgaattgaggtggcatagcgggctgtttcccgtcctcaagactttattgtcttgagggcgttttttatttctaagggagggataagatgaaaaacctgaagtcttggcggtacccgttgcttctgttaaccggaatcgggatagcaaatattggtgaatggatctattttttgtctcttaatcttattgtcttaaaagaaacggggtctgcttttgcggtttccatcctttatttaatcaggcctgcggctgttttgatgacaaatggctgggcgggcagcatcatcgaccggtgtaacaaacggaatatgatgatgtcgcttgatttcacccgggctgcattcattgccgttctgccgctgatggttactgcacggtctttattttccgtttattgtatcgtgtttttgattcatatggccaatgcgatgtttcgtccgtgttccatggcgtatgtgacgatgcttatcccggctgaaaggagaaaacgattcaattcactaagggctttgtcggaatcaggggcttttctcctcgggccggctgcggccggactgctttttatcgccggcacgccgatttttgcgatttgggtgaatgcggcggctttagtgctgtccggtttcatcacgatgatgctgccgaaccttgaaaatgagcctcacgtacattctcccagacagaagctttctttggcagtgtgcaaagaagattggaagctcgtctatcgcttcagccgaacggcgcgaaacgtcatgatcatttattttttattcagtctggtcatgaccgttatgccatccgcgcttgattcgcttgaagccgcttttgcaaaagaagttcttcagctgactgatgccgattatggttttctcgtcagtgtctcaggggcaggcattattgcgggagcgcttgtcaatgtgttctttaataaaaaaatgccggcttctttattgatgggaatgggctctttattcacagcggccggatatatgatttatgcgttttctgacgttttttggacggctgctttcggatttttccttctcgctttttttctggcgtttgccaatacaggctttctgacgttttatcaaaagaatgttccggtggacatcatggggagagtggggagcttttattcattagtcgaagccgtcttcattatagtagtaacggcggttttcggagcggcttctgtcagttcttccgtccgcggcatcgtcatcgcaggcgctgctgttatgctggcgttggcagccgttttatgctcgttcttatttgcggccgcaagaaggaggactcctgatgtatttcaagcggatcaatttaaacaaacataaagagacggccgtttcgtttggtgaggattcgtttttcgtcagctttggcacggcggatcattttaatagggatgaatatctcaggtggctgtcatcccaaatcaaatgctttcccgacggttttatgctgctttttcataacggacagccgatcggacagctagaagcttccatcaaattttaccgcagccaaaaaatcggttatgtgcacctttactatatgactgagaagcagaggggaagggggtgcggaacgaaaccgcatcaatacgcgaatcagtttttcagagcgaacggtgtttcggaatatcacctgagagtttcgccgagcaatgaagcggctctgtcattttacagaaagaaaaacatggaagtgatcggttcagaatgtaacggaaaagttctcagaatgagaggagccgtaccgccggaatagggggcggtacgcgcttcattttttcgttgtttttaaaaggccgggaaacttcttataaatgaccgccattaagacgagcatatacattccgtaaatcccgaaagacagcagtttgttgcttgtaaatgaagcgcctgcgacggtcacgatcacaatgttcggaattttgccgagcaccgacgcagaaaaaaagatcggccatcggatattactcagcccgcagacggtattcatggcaagcgacggtataatcggaatcagccgcccgaaaagcaccgccgtaaacgcgtgctgatgaaatgaatcttcatattgggccgctgccgggtaagccagcagcttttttctggcccagtctctgaatccgtaccgaacgagaaaaaacaacgccattgttccgagcatcgcgcctgacaatgtaatccacaccccgtttacaatcccgaaaaccgctccgtttaaggccgcgataatggcgaatggaacaatcggaaaaaatacgtcagctgcgaccagaaggatactcataagcacggcgtacatgccgcccgcgcgaatcatgctgagccagacgtctttttgcaaaaagccgatcatcacgacagcaatgatgacggcaagactgaatcccttttttatcatctgcacgttcacctcttttcaattagtatacagcacaaatctatctccttctattaaaataagctgtccgataagcgtatttgatttatcagcatttgccgtttgatgagaaacggctgcacccggatttggacaaaaacaagcgggtgatgtgcatcatttgatgcagagaatgattttttataaaaggggacacgttaacagtagtgtttactggaggtgtaaacgttgagatgctttcatctgatcatcatgatatgcgtcctcacgagtctcactgccgtgtccgccgatgcgaaatctttaaaaagaagtgacatggagaaaacgggaaacgtgtactgggataaaaggtctgaaaaaaagaaactatctttaaccttcgatgacggcccccatcctgtctatacggaggctgtgttagacgtgctgaaacagcacaatgttaaagcaacctttttttgtgtcgggagccgtatagacaaataccccataacggcaaaacgcatcgttgaagaagggcatgaaatcggcaaccatacgatgaaccatgtttattttcaccgactgaaacgcaaagacattttacaagagcttcacagctcagcgcatcatatcacatcgctacagccggaaggggacaagttattccgcccgccgggagggtcgctgaatcatacggctttcaaaagcatcttaaaagagggctatcatatcatcatgtggtcatggaaccaagatccgagggactggaaaaggccagggaaaggaaaaatcgtcaggcacgttgtttcacatgccagagatggagatatcgttcttctgcatgacggcggaggaaaccggcgccagacggttgaggctttgaaagaaatcattccaaagctgaaaaagcagggctacacgtttgttaaggtttcggatttgatcggacaggattccggtccttttcatatccagtaaagagagcgccgcgttgaaagccgccaaagagatgtgtaccataggaggtaaggtttggggggagagaaaatgaagtttgctgttctttttattacgataatctgtctgttatcaggatgcgccgcgggcaaagaaaaaagtgttgtcgcgttcggcgacagcaatacgcgcggttccaactgggattatcgtgattatccgaaggcgcagcagtgggtaaacattttaaaaacagcggaacgcggccgtcttacggttataaatgcgggaataggcggccagacgactgaggatgcgcgcctgcgttttcaaagcgacgtgctggaccgtaagccccaatatttatttatcatgttcggaacaaatgatgcgggcattttgacgggcgatcagccgcgggtatcaaagaaacggtttaaagaaaacctgacttatttcataaacgaaagcagaaatcacggcataaagccgattttaatgacgtgcatcccggttatagaaggaaacggaacgcatcatctctattactattcgagatataaagcctcagcctttaaagaaaaaggcggcgcgagaaaatggcataattcctataacggcgttacgaggcaggttgcagctgagttgaaagtgccgctggtggataactggaaacactttatacgcgcggacggcggcaaagatacagaccgggcgctgattcaatccggactgatagatccctccggaaatcatatgacgccaaaaggcgccagaatcttaattgaaggcataaaaaatgggcgggttttggaacgctgacgccgtcagctgcctaaaccgttttgcttctgcttcataggctgtagaaaaaacatctttttggaggcgattgctatgaaccgcggtttccctccgcaatatcctgtatgcccgcctcctcgggtgaatgcggggtactggtacgcattttttgttgtgctgctcgtcgtcattctcgtcctgggcggtctgtattggttcaatatatagcagctgtcctcttaaacacctctattttaggggtgttttttgttgaaagtggtagtaatgcgcataaccgaagtgatataatatcagtcatctgagtaaaaaaaggaaattcgcccgggaacttttttctgtttaagaagaaacggaaataatgtgtccgagcgatcttcttttaatttcgctttcaattaactcgataaattcacggctcaaattcatttcattggctttgaaataagattctattagtaattcatcagaaagctttctcatgccggggacccaattaatgggagtggcacctccttacaattgtaatcaatcatcagacgcaagcatatgatggaaggttgcgtttcaatcatggtgaggttatctttaatctaccatgaaatacaaataagaacaatcgttctgttatccacactcgtaagtggataacctgttagtatcttgtttataatctggataaatccggatgtaataagagtggataatgtgtgtaattttatccacaactggtgaagaaacccaatttttgtcgaaatttttttactgagtccgactttgtttttaaatctgacaggtttcgacatatagatggtagaaagaaaaggaagggtgcgggttttgttaaaaaagttttttttacctgacgaatttgtgaaaaatatatttcatatcacaccggaaaagctcaaagaacgcaatgtgaaagggattattacagaccttgacaacacgcttgtggagtgggacagaccgagtgcgacacctcgattaatcgagtggtttgaagaaatgaaggagcacggcattaaagtcacgatcgtctccaataataatgaacgaagagtgaaattattctcggagccgcttggcataccgtttatttataaggcaagaaaaccgatgggacgcgcctttaaaagagccgtcagcagcatggatctgaaaaaagaagactgtgtggtcatcggcgatcagctgcttactgatgttctcggcggaaacagaaacgggtatcatacgatcctcgtcgtgcctgtcgcttcctctgacggagtcatgacgcgctttaaccgccggattgaacggagaatattgagttctttgaaacgtaaaggccatattcagtgggaggattagaaatggaaaaggttgtttgcatcggctgcggagtaacgatccagaccgaggataaacaaggtctcggatacgcgccaaaggcatcgctcacgaaagagaatgtcatctgccagcgctgcttcagactgaaaaattacaatgaaattcaagatgtttcattaacggatgatgactttttaaatatcttgcacacaatcggcgatactgactctcttattgtcaaagtcgttgatatttttgattttaacggaagctggataaacgggctgaaccgctttgtcggcggtaatccgatcattcttgtcggtaataaggccgatatcctgccgaaatccgtaaaacgggaacggctcgttcaatggatgaaacgcgaagcgaaagaatacggcttaaaaccccttgatgtctttttaatcagcgcttcccgcggacaagggatgaaggaagtcattgacgccattgaacattaccgcgaagggcgcgatgtgtatgtggtgggctgtaccaatgtcggcaaatccacatttatcaaccggattattaaagaggtctcaggggaagagaatattattaccacctctcaatttccgggcacgacgcttgacgcgattgaaatcccgctcgatgacggatctgcgctttatgatacgccgggaatcattaaccatcaccagatggcgcattacgtggacaagcgtgacttaaaggtgctgacaccgaaaaaagaactgaagccgcgcacttttcagctgaatgaaaaacaaacgctttatttcggcgggcttgcccggtttgactatgtatcaggcgataaaacggcgtttgtctgctatatgccgaatgaattgatgattcacagaacaaagcttgaaaatgctgatgccttatacgaaaagcatgcgggagaactgcttaccccgcccggaaaagatcatttggatgaatttccggagcttacgccccacacgtttacgattaaagaaggaaagacggatatcgttttttccggtctcggctgggtcacggtgcagcaagaagataaaaaaataacggcatacgctccgaaaggcgtacacgtatttgtccgccgttcattaatatagagagaaggggagagggagcatgaaacaattgtacggagtaatcggaaatccgatcgggcattcaatgtcacccgatattcataacgcggctttgcaagataagaacatcaacgggcagtattttgcgtttcaggtggaacctcatcatctcaaggacgccgttaacggaatcaaggcgcttggcatctgcggagtgaacgtcacagtcccgcataaagtcgcgatcatggagcatctggatgaaatacatgaaagcgcgaaagtacttggggccgtaaataccgtcaaaagagagggagacaggctcatcgggtataatactgacggagatgggttttataaatccttagtcaaagtattggacaaaccgatatcagagctctctatcctcatgattggggcgggaggagcggcaagagcgatttttacgacgatcgtccgcggagagccgaaacaatttgacgtttgcaaccgcacgccggaaaaagcggaaagcctgattgcggctgctccctcttttcagcagaaacgcgcccttactttaaaagaagctgaaaatcagcttgaacaatatgacgtcattattcatacaacatctgtcggcatgtatccgaaaacggatgccgtgccgctctcattggaacgggccaaaacgggcgccatcgtttgtgatatcgtatacaacccgattcaaacggcgttcttaaaagaagctgaaaaaagaggtttaacaacccttgacggtgtcggcatgtttgtggaacaggccgcactgtctttcaagctgtggacggaacaagagcctgacagcggcttaatgagagcgattgttgaaggaaaactaggaggaacacaatgttaacaggaaaacaaaaacggtttttgcgttcaaaagcgcatcatttaacgcctatttttcaagtgggaaaaggcggagtcaacgaaaacatggtgaaacagattgccgaggctttagaagcaagagagctgattaaagtcagcgtgcttcaaaactgcgaagacgataaaaatgatgtcgcagaagcccttgtgaaaggcacccgctcacaattggtgcagacgatcggaaatacgatcgtattgtataaggaatcaaaggaaaataaacaaatcgagcttccgtaaggtggttgacatgaagaaaatcggaatattcgggggcacatttgaccctccgcacaacggacatcttctgatggctaatgaagtccttcatcaggcggagctcgatgagatttggtttatgcccaataaaatccctccgcataagcagaatgaagactttacagacagccggcaccgggtggagatgctgaagcttgccatcagctctaattccggctttaagcttgagcttgcggaaatggaccggaaaggcccttcttatacctatgataccgtccgtttactgaaggagcggcacccgaacgacaagcttttctttattatcggggcggatatgattgaatatctgccgaaatggtacaaactggacaaactgctcacgctcattcaatttatcggagtgcggcgcccggggtatcatattgagaccccgtacccgctgctttttgccgacgttccggaatttgacgtttcgtcaacgatgctgagagaacgtctcaaagcaaaaaagccgacgcaatacttaatgccggataaagtgaggcagtatatagaggagaatgatttatatgaatcgtgaggaagcacttgcctgcgtcaaagagcagctgaccgagcatcgctacatccacacaatcggcgtgacagatacggcggttattctcgcaggccggttcggagcagacccgaaaaaagcggaaatggcggctatttttcatgattatgcgaaattccggccgaaagaagaaatgaagcagatcatcgtgcgggaaaaaatgccggctgagctcttggattacaatgccgagctgtggcatgcccctgtgggagcgtatttggctgagaaagaagcggggatcactgatcctgagatcttggatgcaatccgttatcacacgtcagggcgtcccggaatgacccttttagacaaagtcatttacgttgcggattacattgaacccggacgccatttccccggagtggaagaggtgcgccgtctggcggaaacggatctgaacgaagcgctcatacaagcgatgaaaaatacaatgatatttctgatgaaaaaaaaccagccggtctttccggagacgtttgcaacctataactggctggtgtctcaaaattgacaggaggaatatggaaatgaatcaagcttccgtattaaaaatcgcggcaaaagcatgcgacgataaacgtgcagaagatattttagcgctggacatggaaggaatctcacttatagcggattactttttaatctgccacgggaattctgataagcaggttcaggcaattgcgcgtgaaattaaagatcaggcagaagaaaacggcattgatgtcaaaaagatggaagggtttgatgaggcccgctggattttagttgatctcggcgacgtcattgtccacgttttccataaagatgaaagaagctactacaatcttgaaaagctatggggcgacgcgccgctcgcagagcttgaactcggcttgaactcatgatttaccaaggcttcgccggcgtatatgacgagttaatgtcacatgcgccgtatgatgaatgggcgggctggatcgaagcgtctcttccggaaaagggaagggtgcttgatcttgcctgcggaaccggagaaatatccatcaggcttgctgaaaaaggctgcgaagtcacggggattgatttgagtgaagatatgctgagctgtgcccagcagaaaaaaacgggaaagccgattctttttctccaacaggatatgagagagctttccggttttgaagaacagtttgatgccgttgtcatctgctgtgattccctaaattacttaaaaacgaaaagtgatgtcttaagcaccttcaaaagtgtttttcaagttttgaaggagggcggcctgcttctgtttgacgtccattctccatttaaaatgacggagctttttccggacagcacccatgcggatcaggatgagcagatcagctatatctggcaaagctttgccggcgatgaagagctttctgtcatccatgatatgtcctttttcgtatggaacggacaatcttatgaccgttatgacgagacgcatgagcaaaaaacattttacattgaagaatatgaacaaatgcttgcagagaccggatttgaactgaagaaggtgacggctgattttacagaccggcctccttcaacagagtctgaacgtcttttctttacggcaggcaaaccaaaaaccatcgtttaaacggaacgatggtttttaaaatgcattttttgcgattggcgcgataaagcactttatggcatactcagttacacgtgaaattgcttcttcactaacgatatatcttcatcgtatttgtcatgtgtacgctgaaagacacggttgaacatatcctgaacaccgctttcgagagccttcagtccttccccggtgacgccgccttttacgcatactttttcctgcaaggcgggaagcgtgtaatgccctgtttccagaagctttccgagaccgacaagcatctccgtcgacataatcacggcttcttctttggtgatgtccgtttcttccactgccgcgtcaataaagcgctgaacgagataactcataaaagcgggcccgcagctgacaatgtctgacgccgctcttgtaatgccgctgctgatttccacaggttttgaaatatgagtgaacagcgtttgaatatccgcttttgcagactcgctgcagcttttgccgaacgtaacaagcgagacgccggccaaggcgcggttcgtaatgctcggaatgacgcgggccgtctgacacggaaccgtatgttcaatctgatccgtctgaacggggctggtaatggagattaaaatgtgatctttccgtaaatgcggtgtgagttttttcagcaaaggatatatatccagcggttttacacaaatgaatattatttcattatcctgtacgagcttttcctgatcctcggtgacatggatgccgctgaaacgttcttctagttttaatgctttttcgattgttctgtttgtgatggtgatatgtgagggatcggcagcgtttgattcgataaacgattcaatcaggatcgttcccatgtttccggtgccgataaagcctattttcaatgaattcccctcctttttcccttaatcctctaaaccttatgcggggaggcaatgcaatatgacgaaagcgatgatgacggagcggctgcggcggaacctgaaaattctgggcgcttgtcttgcggcaggggcggtttttatctgtatttggctgtttcgttctgaaaaggaagagccggtcaaacagcagtccgtgctcggccaaacagcctcagcatccgtcgcggacaaaaaagacaccgcagccgataagattatgattgatgtgaaaggtgcggtccgaaatcccggcgtgtatgaaatgaaagcgggagacagggtgacgcaagccattgaaaaagccggcggcctgaagaaaaaggcggatgaattgaatgttaatttagcagagcagctgcaggacgggacgattgtttatattccgagtgaaggcgaagaggagaatcgcccgaaaacagcggcgggtgaaaaggagaatgcagctgtcaatatcaatacggcatctctggacgaacttcaggcgatttctggggtggggcagaaaaaagcggaagcgattatcgcctaccgagaagaaaacggacagtttcagactgctgaagatttgatgaatgtatcaggctttggagagaagtcatttgagcggataaaaacttccattacggtaaagtgaattgacggttttgcttaaatctatgtaaacttagaaaagcaacaagactttttggagggaacacttgtggaacgaatctcatggaatcaatattttatggcgcaaagccatttgctggcgctgagaagcacatgtccgagactgtcagtcggggcaaccgtagtcagagacaagcggatgattgccggcggatacaacggctcaattgccggcggcgtccattgcgctgatgaaggatgccttttaatagataatcattgccagaggaccatacatgcagagatgaatgcgattctgcaatgttctaagttcggtgttccgacggagggcgccgaaatttatgtgacgcattatccttgtattcaatgctgcaaatcaattatccaggcaggcatcaaaacggtctattatgccgaagattacaaaacacagccttatgcaaaagagctgttcagccaagccggagtcaaggtggagcaggtcgaacttgatgagatgatcatcgatctgaaaaaccgtgaaaaattgtcttttgtagcaggtctgattcagcaattatctgatgcgggggttaaggcagatgaactgaaaaaaattcatgaacaggccaatgagctgtttaccagttacgtataaatgaaatataaataccttcttctgcctctggcggcggtttctgcaactgcgggaattgccgccgctcatgtcttctgggttctgctcctttttcttctgtatcttctctttattattgtaaaaacaaagcagtatgctccggttatcgtctgcctcgtttctttttgtctttatttctttctttatacggtttgtgacgctgcgaatgtaacgcgctatcaggccggcagttatactgaacaggccgtcatcactaatattccgaaggttgacggagcgaaaatgtcagctgttatccgtacacatgacaaggaaaaatgggcggcttcgtacaaaatccgttctcttgaggaaaaaagactcattgaacagcttgaaccggggatgcgctgcacgtttacaggctctctggaacagcctgcacatgcgacggttcccggaggttttgattataaggaatatctttactctcagcagattcactggttattttccgtgacttccattgagcagtgtgaaaaatccaaacagccgctgtttaaactgctgaacatcagaaaaaatttgatttcgatcattcggaatcacgtgcctgaatcttccgccggaattgttgaagcgctgaccttaggtgaaagattttctatagaggacgatatactgagtgcgtatcaaaatttgggagtcgttcatttaatggcgatttccggaatgcatgtcggtcttattacggcgggattattttatgctctgatcagaatcgggctgacaagagaaaaggcgggaattttgctgctgctgtttttgccggtgtatacgctgctgagcggtgccgccccatccgtattgcgcgcatccctcatgctggggttttatatcgccggaactcttgttaaacgcggcattcattcctctgctgcattgtccctgtcttatctgctgcttctgctgtttaatccttacttcctttggcaggcgggcttccagctttcctttgcggtaagcgcctctttaattctgtcatcctccattttaaagaaagcagggaaaagcagacttgccgggcttgcgatggcttcattgattgcagagctcagctcacttccgtttcttctctatcattttcagcagatttcacttgtcagttttccgatgaatatggtgatggtgccattttatacgttatttgtcattccggtttctgtcatcggtttccttcttcttttactctcaaggcaggtgggagaatgtttgtttgatatgtttgaccttgtgatgaagcctgtgcatgatttcattacatatgcggcatccgttgatttatttactatgattgtgtcaaagcctgactttctttcccttctgctgcttgcggtttccgtttttacgctttttgcggctttggaaaagggaggttttttaaaactcaggaagtcggctctttttttctgcgcggttttggcttatttaatatgccgtccgtatttcagtccatggggagaagcggatatgcttgatatcgggcagggagactcactgtttataagcgcgccgcaccgcaaagggaccgtaatggttgatacagggggagtgattgcttatcccggagaatcatggaaagaaaaacgtcacccgtattctatcggcgagaaggttttgattccatttttaaacggaaaaggggtgaaaaagctggatgcactgattttaacccatgcggatcaagatcacatcggggaagccggagtgttaatcaaaaatcatagagtcaaacggttaattgtccccgtaggattcgtaaaagaaccgaaagatcagaacatattaaatatggcgaaagaaaataacattcccgttgccgaagcaaagcggggcgacaccattacagccggtgatcttcagtttcaggtgctgtctccggagtcgtctgacagaaggagtaaaaatgattcgtcactggtgctttggacggtttttggcggagtgagctggcttttgacgggagatttagaatcggacggcgaaacagaagtgctgaaaacgtatccgaatctgaaggctgatatattgaaggcgggtcatcacggcagcaaaagctcaacgagtgaagcctttttgaagcagcttcagccggaagcagcgctgatttcagcaggaaaagagaatcgataccatcatccgcatgaagaagtgctggatcgtttgaaggcgtactctgtaaatgtgcttcgcaccgatatcagcggaacgattcaatacagatttaaaaaaggcgccggaacgttttccgtcttccctccatatgatatagaagaaaccagggcgcaagaagtaaaaaagactgccgattgacagcagcccggaatgcggctaagagccgataagatggatggctgttgccatcacgaacaaaaaggcgaaaaatccgaaggacacgacaaaaccgacagctgagtcaacagcatcatttcgtttgctttgaacgtttttttcaaaatcattcaatttcatccctcctgacttccctaagtatactggaattgttttgaaaaatctagaagtgatggtaacgttttctgttcttgtgattatcgcctttttacaagcagacccgggagcttgtgaatcaggcgtttattataaatgaggaagctgtccttaaagcttcctctttactaattgccgaactcaatttaggatagaaggggatcaagaaagagaggaagtcatacgatcatggtatttgatgtttggaaagccctgaaaaaaggggatgtccgctccgtttattgtttatacggaaaagaaacgtatctgctccaagaaactgtcagccggatcagacaagctgtcgttgatgaggagacaaaggattttaacctgtctgtttttgatcttgaagaagatccgcttgaccaggccgtaaccgatgcggaaacgtttccgtttatgggggagaagcggctggtcatcgtaaaaaatccgtcttttttaacaggggaaaaaaagaaagaaaaaatagagcataatacagccgctctggagacttatctgaaggagcctgcaccttatacggtctttgtgattgtggctccgtacgagaagctggacgaacggaaaaagctgacgaaagcgctgaagcaaaaagcccttatgattgaagctaaggagctgaatgcaaaggagacgactgattttacgattaatctggcgaaatccgaaaataaaacgatggatacagaagctgccgagcatttggttctgcttgcaaacggtcatctgtcttccatatatcaggaaatacaaaaactctccgcctacaccggtgacagacatgagatcacgcttgaagatgtccgggagcttgtcgcaagaagtttggagcagaatatttttgagctgatcaacaaaatcgtgaaccgaaaacggacggaaagtcttcaaatattttatgatcttttaaaacaaaacgaagaaccgatcaaaattatggcgctgatcgccaaccaattccgtctgattatgcagacgaagtattttgcgggacaaggatacggccaaaagcaaatcgcttccaacttaaaggtgcaccccttccgggtaaagttggcgatggatcaggcgaggcttttttcagaagaagagctgcggcgtattatagaaagactcgcagtgatggactatgaaatgaaaacggggaaaaaggacaagcagctcttgctggagctctttctccttgagcttctccgcactgaatgaaaaaaacgatccccgttaaagggatcgtttttgtattatgcagaaagtccgttcacttgtttcgcaagtctagatttgtatcgagctgcggcatttttgtgtacaagacctgttttcactgctttatcaatgcgtttcgctgcttcagaaagagcagttttcgctttatccgcttcgttgttagcaacagaagcttcaacttgtttgattgcagtacgcatagcagatttgattgtcgcgttatgagcgcggcgttcgttgtttgtttttgtacgtttaatcgctgatttaatgtttggcatgtgtttcacctcctaagatacaacctgtagcacagtgtcttaaggttaaatcttcttcacaatagaacaaattgtattctatcaaacagaactttagattgcaatataaatgtaaagtatttttcgttgatgggtaaattcgcatgattcgttttgtaaatggccacactatgtaccacgatgattgaaggaggtcttccctgtgaaaaacaacgaactggatgtcaatcaatttctgatacggacggatttagcggtagaaacgaaacaggcggtaaaagacggacaagccggtcagaaaaaagaaataaacgggtttattgaaaaagaacgcgacaagggcggcattaaagtcagaaccgtcgatattaccaaagaaggcgccgagctatcggggaaaaagcagggacgctatgtcacgatcgaggctcaaggggtccgggaacacgactctgacatgcaggaaaaagtaacggaagtgtttgccgaggaattttccgcctatctgtcggcattaaagattccaaaggatgcaagctgtttgatcgtcggtctgggcaactggaatgtgacgccggatgcgctcggccctctcgtgaccgaaaaccttcttgtgacaaggcatctgttcaggcttcagccggaaaacgtgcaggaagggtacaggccggtcagcgcgcttgctcccggtgtgatgggattaacgggaattgaaacgagcgatattattcaaggtgtgatcaaagaatcaaagccggattttgtgatcgcggtagacgctcttgcggcaagagccgttgaaagggtgaacacgaccatccaattttctgatactggcattcacccgggatcaggcgtcggcaataagagaaaagaattaagcaaggaaacgctcggcattcccgtcatcgcaatcggggtaccgactgttgttgacgcggttacgatcgcaagcgatacggtggattatatattaaaacatttcggaagagagatgaaagatgacagcccgtcaagatctctggtgcccgccggaatgaacttcggcaaaaagaaggtgctgacagacgaagaccttccgggagaaaaagaacgccaatcctttctcggtattgtcggcacgctggacgaaaacgaaaaacgccagctgattcacgaagtgctttctccgctcggccataatctgatggtcacgccgaaggagattgacacctttattgatgatatggcgaacgtacttgcaaacgggttaaacaccgcccttcatgaaaaagtgtcacaagataacaaaggttcttataatcattaaaatgagttctacctcctctagcttgttcatagagtaattactagacaagcgctggagggattcaaatcatgagaaaaaaacgcagaaaccgtcaaattgtcgttgcagtaaacggtggaaatgcgctcaagggcatgtttttgtttatgacaagccttatcgttattttcgtattatcgggtgtgctcacatcgcttcgccctgaactgaggctttcttcggattctcttcacgggattgccggagaacttccgggtgacgcgtttgcacacctcctcggcatggaaaatcattatttcgcctcagagcttcctgaaaaagactcttttcagctgtcccggctttccttaaaactggcgacaagcattaatatggaagacccgcggagtttcttgggacgtgagctgccgggatttgcccaatacgatacggagatccttctggcggggcaggggacggattatacgaatatgccggctgaatctccgccgccgtcaaaggtgatggaaaaagaaaaagaagtgaacctggcagaaatcgaaaacaaaacgaaaaaagaagaaacggcgccgccgaaacattcaacaggcagcaaaaaagtcgtttttatttaccacactcataatactgaatcctatcttcctctgttaaagggggaaacaaatccggataacgcccgccattcgaaggccaatgtcacacttgtcggagatatgttcggaaaagcgcttgaagcgcaaggtgtaggagcgaccgtagataaaaccgacattcaggcccgtctgaacaaagacggtttaaattatgcgcgaagctacgacgaatcaaggccggtcgtaaaaagcgcgctcgccaaaaataaaaacctgcaatataccatagacattcaccgggattcccgccgcaagaaaaatacgacagccgacatcaaaggaaaaagctatgccagagtcgccatcgtcgtcggcaaaaaaagcgctaattttgaagaaaactataaactcgcaagtgaacttcataagctcatggagaaaaaataccccggcttaagcgtcggtgttttatcaaaaggctctccgggagataatggagtatacaaccaggatttaaacgaccggtcgcttctgctggaattcgggggcgtggataacaatcttgaagaactgaggcgtgcatcagatgccgtggccgatgtgttcagcgaactgtactgggatgcagaaaaggtcagctcgcaatcaggagagaagaaaaaacaatagaaatcaggtgattcgaatgatccgttttaccggcaaatgcctgctgatcgccattgtcatgtttttcggcgttttgttcggcatgcagcaggcaaacagcggaatgcttgatatgaaaggatacaaagatccctccttaaaaggagcattcacgctcggcggcggagaaggacaggaaaaagaagcttccattttggggcaaaccgttacggcgaaagatctggaagaaaaacaaaaacagctggaacaggcggaaaccttcaacctgttttcaaaagccggagaaaccctttcaaataccgtgacggactcggcgcaggcgatgtatgagtgggtttcgaaactgaaccgttagcattgatgaagagaaaagcggatgattccttaaaggaagcttttctctttcttgttttaattgaatgtttacaatcctattgatataatctaagctagtgtattttgcgtttaatagtaggagtgatagattgtgacagataaagaaaagcgtttagagaggcagtcaagaatccggaatttctccatcatcgcccacatagaccacggcaaatcgaccttggcggatcggattttagaaaaaacatcggcgatcacccagcgggaaatgaaagaacaattgcttgattcaatggaccttgaacgcgaacggggaattaccatcaaattaaattccgttcagctgaaatacaaagcaaaagacggagaagaatatatatttcatctcatcgacacgcccggacacgtcgactttacatatgaagtttcgcgaagcctggctgcctgtgaaggcgcgattctcgttgttgatgcggctcagggaatagaagcgcagacattggcgaacgtctatctggcgcttgataatgatcttgagattcttcctgtcattaataaaatcgatctcccgagcgcagagccagaacgtgtgcgtcaagaggttgaggacgttatcggccttgacgcttcagacgccgtcctcgcttcagcgaaagcgggcatcggcatcgaagacattttagaacagatcgtagaaaaagtgccggctcccgcgggagatccggaagctccgctgaaagcgctcatctttgactcgctttatgacgcgtaccgcggagtcgtcgcgtatatcagagtcgtagaaggaacggtcaaaccgggccagaaaattaaaatgatggcaaccggaaaagagtttgaagtcatcgaagtcggcgtcttcacgccgaaagcgcagccggctgacgaattgacagtcggtgacgtaggctatttgacagccgcaatcaaaaacgtcggcgacacccgtgtcggtgatacgatcacgagcgcggttaagcctgcggcagaagcgcttccgggctaccgcaaactcaatccgatggtatactgcggactttatccgattgacacagccaaatataatgatttgcgcgaggctctggaaaaacttgaattgaacgattcatctcttcaatacgaggcggagacgtcacaagccctcggcttcggcttccgctgcggttttttaggaatgcttcacatggaaatcattcaagagcggattgaacgggaatttaaaattgaccttatcacgaccgcaccgagcgttatttatgacgtttatatgacggacggcgaaaagatcatcgtggataacccgtcaaacatgcctgacccgcaaaaaatagagcgggtggaagaaccttatgtcaaagcgacgatgatggttccgaacgattacgtcggagcggttatggagctttgtcaggggaaacggggcaactttatcgatatgcagtacttagacgccaaccgggtcagcattgtatatgagatgcctcttgcggaaatcgtatatgaattttttgatcagctgaaatccagcacgaaaggatacgcctctttcgattacgagctgatcggctacaaaccgtctaaacttgtcaagatggacattatgctgaacggagaaaaaatcgacgccctttcatttattgtgcatcgcgattacgcgtacgaacgcggaaaagtaattgtggaaaaactgaaagagcttattccgcgtcagcactttgaagtaccgattcaagcggcgatcggacagaaaatcgtggcccgctcaaccattaaggccatgcggaaaaacgtccttgcaaaatgttacggaggagacatctcgcggaaacggaagcttcttgaaaaacaaaaagaaggaaaacgccggatgaagcaggtcggctcagtagaagtgccgcaggaagcgtttatggccgttcttaaaatggatgacagcccgaaaaaataacggaagccgccgcagtcccgcgctgcggcttctttctgtaaagaagaaggtgtttcaaaatgaaatcagcttatattcatattccgttttgtgagcatatctgccactattgcgatttcaataaatattttattcagagccagcctgtcgatgagtacttaaactcactcgaaaaggaaatgataaatacaatagaacggacgggacgccctgatctccgcacgatttttatcgggggaggcacgccgacatcgctctcacccgtccagctggaaaaattgatggattccattcaccgcgtgctgaagccttctgacggactcatagaatttgccgcggaagcgaatccggatgatttgtctccggaaaaattaaaaatcctgaaaaatgccggtgtcaaccggctgagcttcggtgttcaaacctttgaagatgagcttttacaaaaaatcggcagagtgcataaacaaaaggacgtattcacttcctttgaacgtgcgagggctctcggcttcgacaacatcagtctcgatttgatgttcggcctgccgggtcagacgctggccgatcttgacaattccgtcaaaacggctttgtctcttgatgcagagcactattccgtttactcgctgatcgtagagccgaaaacggtgttttataatttaatgcaaaaaggccgcctgcatctcccggcgcaagaacaagaggccgagatgtatgaaacggtcatgaggcagatgagtgaagcgggcatccttcaatacgagatcagtaactttgcaaagcccggatacgagtcgcggcataatctgacgtattggagcaatgaagagtatttcggttttggcgcaggcgctcacggatatatcagcggcacgcgcaccgtcaacgccgggcctgtgaaacattacatgcagctcatcgaagaaaaggggctgccttaccgtgacacgcacgaggtgacacgtgaggagcagattgaagaagaaatgttcctcggtctcagaaaaatgtccggcgtacaaaagcaagcttttctcgataaattcggacgctcggtcgacgaactgtttcccgatgttctcaaagatttaaccgaaaaaggcctgatttgtgacacgaaagaatcggttgcattaacgcatgagggcaaattattaggaaatgaggtttttggcgcttttttgggtgagttataattgacatttttcttttggtttgttacttttgatatagaattagcactcgctgaccttgagtgctaacaggggtgatgatgatgttaacaaatcgtcagctgttgatcctgcaagtgattattaatgattttatacaatcagcgcagcctgtaggatcaagaactctttcaaaaaaagacgagattacattcagctctgcaacgatcagaaacgagatggctgacttggaggaattgggctttattgaaaaaacccattcatcctcaggacggattccgtcggaaaaagggtacaggtattatgtcgatcatttgctgtcacccgtcaagctgacaaaaaccgatctggatttaattcactcgatatttaaagaaaaaatcttcgagctggaaaaaacagtccaaaaatcagcgcaaatcctgtccgacctgacaaactacacatcgattgtcctcgggccgacgctgagcgagaactatcttaaacagattcaaatcgtaccgatccagccggataaggcggtcgccattctcgtcacgaacacggggcatgtcgaaaaccgcaccatcaatttcccggctaaagtggatttggccgatattgaaaaactggtcaatatactaaacgatcgattagcgggcgtgccgatggacgaactgaatgagcgcattttcaaagaggttgtcacatatttaaggcagcatatcgccaactatgacagcatacttgaatcgctccgctccacattccatccggcggcccacgttgagaaattgtttttcggcggaaagatcaacatgctgaatcagccggagttccatgatattgaaagggtccgctcgctcttatctttaattgaaaaagagcaggatgttctgaagctgtttcagtcatcaaaagccgggatttcaatcaaaatcgggaaagaaaacgactacgaagaaatggaaaactgcagcttaatcacggccacctatacagttgatacgaaacagatcggatcaatcgccattatcgggccgacgcgcatgaattattcaagagtcgtcagcctgctgcagcacgtgacttcggacttgtcaaaagcattcacaagtttgtatgatgaataagggaattttggcaatcattttcagtcatctttttacagcatttgagggaggtgaacacaatgtcagaagaaaaacaaaccgcagaacaggttgaagcagcagaacaagaagaagtgacagaacaggcagaacaagccgcttcacaagagcagcatgaagaaacggcaggtcaggaagaagcccttcagcaccaaattgatgaattgcagggtttgcttgatgaaaaagaaaacaagcttttgcgtgttcaagcagactttgaaaactataaacgacgcagccgccttgaaatggaagctgctcagaaataccgttctcaaaacgtcgtaacggaaatccttccggcgctcgacaactttgaacgggcgttacaggtagaagctgaaagcgagcagacaaaaagcttgctgcaaggtatggaaatggtccgccgccagctgatggacgcacttgaaaaagaaggcgttcaagccatcgaagctgtcggccaggaatttgatccgaaccttcaccaagccgtcatgcaggtggaagatgaaaacttcggcagcaatattgttatcgaagaactgcaaaaaggctacaaactgaaggatcgcgtcattcgtccttcaatggtaaaagtgaatcaataactacatagcaggaggtaattcaaagtgagtaaagtaatcggaattgacttgggtacgacaaactcatgtgtggcagtgcttgaaggcggagagcctacagttatcgccaacgctgaaggaaaccgtacgactccgtcagtcgttgcatttaaaaacggcgagcgccaagtaggggaagtggcaaaacgccaatccatcacaaaccctaacacaatcatgtctgtcaaacgccatatgggtactgactataaagtggaaatcgaaggaaaagactacacgcctcaagaagtgtcagctattatccttcagcatctgaaagcatatgctgaaagctacctcggcgaaacagtttcaaaagccgttatcacggttcctgcatacttcaacgatgcagagcgccaagcgacaaaagatgccggtaaaatcgccggtcttgaagtagagcgtattatcaacgagccgactgcagcagcgcttgcatacggacttgataaaacggacgaagaccaaacaattcttgtttacgaccttggcggcggtacgtttgacgtatctgttcttgaacttggcgacggcgtgtttgaagtccgttcaactgccggtgacaaccgtcttggcggggacgactttgaccaagtcatcatcgatcatctcgtagcagaattcaaaaaagaaaacggcattgatctttcaaaagacaaaatggcgcttcagcgtttgaaagatgcggctgagaaagcgaaaaaagatctttccggcgtttcatctacacaaatttctttaccatttatcacagcgggagaagcaggtcctcttcaccttgagctgacactgacccgcgctaaattcgaagagctttccgctcaccttgttgagcgcacaatggctcctgtccgtcaggctcttcaagatgcggatctttctgcgagcgaaatcgacaaagttatccttgtcggcggttcaacacgtattcctgccgtacaggaagcaatcaaaaaagaaacgggtaaagaagcgcataaaggcgtaaaccctgatgaagttgtagcgctgggtgcagcgattcaaggcggcgtcatcacgggagacgtaaaagacgttgttcttcttgacgttacaccgctttctcttggtattgaaacaatgggcggcgtgttcacaaaactgatcgatcgcaacacgacaattccgacgagcaagtctcaagtattctcaactgcagctgacaaccaaacggctgttgacattcacgtgcttcaaggtgagcgcccgatgtctgccgacaacaaaacgctcggccgcttccagcttactgatatcccgcctgcaccgcgcggcgtaccgcaaatcgaagtttctttcgatattgacaaaaacggtatcgtaaacgtaagagcgaaagatttaggcacaggaaaagaacaaaacattactatcaaatcttcttcaggtctttctgatgatgagatcgaacgcatggtaaaagaagcggaagaaaacgctgacgctgatgcgaagagaaaagaagaaatcgaagtccgcaacgaagctgaccagcttgtgttccaaacggaaaaaacattaaaagatctggaaggcaaagtggacgaagagcaagtgaaaaaagcaaacgacgcgaaagacgcgctgaaagccgctatcgagaaaaacgaaattgaagacatcaaagcgaaaaaagatgagcttcaaacaatcgttcaagagctttctatgaagctttacgaagaagcggcgaaagcgcagcaggctgaaggcggagcaaacgctgaaggcaaaaaagcggatgacaacgttgtcgatgcggaatacgaagaagtaaaagacgacgaaacgaaaaaataagttctgtcccgcatggctataggcggaagaacacacatcatattctgattcaacagacagaaagtcaaagtcaggcatctcttggctttgactttttttcttgcccgggataaaaggaattgaaaaaacataattcaaaatgatacaatctaatttatgtgagaaattcgggagagtgaagcgagatgagtaagcgtgattactatgaagtgcttggggtaagtaagagcgcttcaaaggatgaaatcaaaaaagcctatcggaagctttcaaaaaaatatcatcctgatatcaataaagaatccggagcagatgaaaaattcaaagaggtaaaagaagcgtacgaagcgctctcagacgaccaaaaacgcgctcaatatgaccaattcggccatacagaccctaaccagggattcggcggcggtttcggaggcggcggagacttcggcggcttcggtttcgatgacatcttctcaagcatcttcggaggcggcacgagacgccgtgacccgaatgcgccgcggcaaggcgcggatctgcagtatacaatgaccctgtcatttgaagacgcggctttcgggaaagaaacgatcattgaaattccgcgcgaagagaattgcgaaacatgtaaagggtctggcgcgaagccgggaacaaagccggatacgtgctcgcactgcggaggttctggccagctgaacgtcgaacagaacacgccgtttggcaaagtggttaaccgaagagtctgccaccactgtgaaggaacaggaaaaatcatcaaaaacaagtgttctgactgcggcggcacgggcaaagtgaaaaaacggaaaaaaatcaatgtcacgattcctgccggtgtggatgacggacagcagctgcgcgttccgggccaaggtgaaccgggcgtaaacggagggccggcgggagatctgtttgtcgtattccatgtgcgcgcccacgagttctttgagcgcgacggagacgatatttattgcgaaatgccgttaacgtttgcccaagcggcactcggagacgaagtggaagtgccgacgcttcacggaaaagtgaaattgaaaatacctgccggcacacaaacaggcacgaaattcagattaagaggcaaaggcgttcagaacgtccggggctacggacaaggcgaccagcacattgtcgtccgcgtcgtcacaccgacgaatctgacagacaaacaaaaagacatcatccgcgagttcgctgaagtcagcggaaacctgccggatgaacaagaaatgagtttctttgacaaagtaaaacgcgcatttaaaggcgagtaatgattggataggagttggtagttttgaaatggtccgaaatcagcattcacacaacacatgaagcggtcgaacccatctcaaatattttgcatgaagctggtgcgagcggggttgtcatcgaagatccgcttgatttaatgaaagagcgtgagaatgtttacggggaaatctaccagctcgaccccaatgattaccccgatgagggtgtcattgtcaaagcgtatctgccgatcaacagtttcctcggcgaaacggtggacggcattaaagagacgattaataatctgcttttgtacgacattgatttgggcagaaacacaatcaccatttctgaagttaatgaagaagaatgggcgacagcttggaaaaagtattatcatcctgtgaaaatttctgaaaagttcacgatcgttcccacttgggaaacgtacacacctgttcatacagatgaactgattatcgaaatggatccgggtatggcattcggtacgggaacgcatccgacaacggttctgtgcattcaggcgcttgagcgtatcgttcaaaaaggcgaccgtataattgatgtcggcaccggttcaggaattttaagcatcgcggccgccatgcttgaggccgagtcggttcatgcgtatgaccttgatccggtcgctgttgaaagtgcgcgtctgaatgtgaaattgaacaaagtgagtgatacggccgaagtgaagcagaacaatttgttagacggcatcacgggcgaacatgatgtcattgtcgcaaatattttggcggaagtgattctccgctttacatcacaggcgtacgacctgctcaaagacggaggccattttattacttcaggcattatcggccagaaaaaacaggaagtaaaagaagcgttggaaaaagccggctttaccatcatagaaattctgtctatggaagattgggtcagcatcatcgcgaaaaaataacagttagtaggtgtcacagcgtatgcaacgatattttatcgagctcacgaagcaggagatggacgaaactcccgattttcaaatcacgggggaagacgtccaccatatagcgaacgtcatgagaatgagtgcgggcggccggattatctgctgttcgaaagacggccatgaagcgttatgcctgctaaaagaggtttctaaagatcatatatcatgcagcattgctgaatggacgggtgaaaaccgtgaactgcctttgaagatcaggatcgcaagcggcctcccgaaaggcgataagcttgaatggattatccaaaaagggaccgagctgggggcaagtatgttcatcccttttcaaggcgccagatccgtcgttaagctagacgacaaaaaggcaaagaaaaagcgggagagatgggcgaaaatcgcgaaggaagcggcggagcaatcgtaccgcaatgaaattcccgaagtgaaaaccgttcatacgttccggcagctgcttgaaatggcggagaatgtcgataaatgtgtcgttgcatacgaggagtcatcaaagcagggagaaacgggcgctttcgctgcggagctcaaaagccttccgcaaggttcgtctcttttaatcgtattcggccctgaaggcggtctgactgagtctgaagttcatcagctttcagaaaaaggcgccgtcttatgcggcctcggaccgagaattttacggactgaaactgcgcctctttacgcgttaagcgcagtttcctatcatacagagttattaagaggtgatcagtaatggcaactgttgcttttcatacccttggctgcaaggtcaaccattatgaaacagaagcaatctggcagctgtttaaagatgcgggttatgaacgaaaagaattcgaacagacagcagatgtatatgtcattaatacatgtacggtaacaaacacgggagataaaaaaagccgtcaagtcatcagacgggcgatccgccaaaatcctgacggcgtcatctgcgtaacagggtgctatgcgcaaacctctccggcagaaattatggccatcccgggtgttgacatcgtcgtcggcacgcaggatcgtgaaaaaatgctcggttacattgagcagtacagggaagagcgccagccgatcaacggcgtcggcaatattatgaaagcacgcgtgtttgaagagctggatgttcccgcttttactgaccgcacaagagcgtcgttaaaaatccaagagggctgcaacaacttctgtacgttctgcattatcccttgggcgcgcggcctgcttcgttcccgcgatccggaagaagtcattaaacaggcgcagcagctggtggatgccggctataaagaaatcgtcctgacggggattcatacgggcggctacggcgaagatatgaaagattataatttcgccaagcttctccgcgagcttgatacacgtgtagaaggattgaagcggatcagaatttcatctattgaagcaagccaaatcactgatgaagtgattgaagtgctggatgcgtctgataaaatcgtccgtcaccttcatatcccgattcagtcaggatcaaacaccgttctgaaacggatgagacgcaaatatacgatggaatttttcgcggaccgtttaaataagctgaaagaagcgctgccgggtctggccgtcacatctgatgtcatcgtcggtttcccgggagaaacggaagaagaatttatggaaacataccggttcattaaagaacataagttttcagagcttcacgtattcccttacagcaaacgcaccggaacacctgcagccagaatggaagaccaggttgacgagaacgtgaaaaacgaacgggtgcataagctgatcgcgctgtctgaccagcttgcaaaagaatacgcctccgattatgaaggagaggttctggaaatcattccggaagaggcgtttaaagagtctgatgaggagggcatgttcgtcggctatacggacaattacatgaaagtcgtcttcaaaggcacggaagatgtaatcggcaaacttgtcaaagtcaaaattcaaaaagcgggctatccgtataacgaaggacaattcgtccgcgtcgttgaggatgaaatgacccgaaacatgcgcatgtcttcataactgataaaaaaaccggtgccttcccgcatcggtttttttacggtttcggaggaatcagcctgtcaatcagccggtaaaacaaatgtgtgaacggcagaaacaataaggcggtgactacgttaaataacaggctgaaatgcgcaatcatctgcgcgggatcatcagacaggcgctccgtaaaacctgctgatgcggacaggaagggaaatacgagcagcacgccgagaatattaaacacaacgtgagcaccggcggtctgtctggcggcataaccgcctgaaacagcagccatgacggccgtgacgcatgtcccgatattagatcccagaacgacgctgaccgcttgttcaatgccgatcaccccttcgttcataaaactcatcaaaatgccgatgcagacggagcttgaatgaatgattgccgtcaatatcataccgataaaaagagcggaccagctcgaatcattcacatgtcgcaatacctccgcccccgccttcatttctgtcagcggaacggcgagccggctgaagcatgtgatgcaaaaaaagatgatgccgagaccgaggaagcttatgccgatctgcctgaacggatatttacggaggaggataaacacaaggcctccgataaaaagcacccaaatgagcacatccatctttatggctaaaaactccgtcgtaaacgtggagccgacattcgtgccgagaatcatcggaatggtccgtttaaaagataaagcgcctgcgctgacaaagccgatgacaatgaccatgaaggctgagctgctctgaagaaaaccggtgaatacgatgcttatgagaaaagctttcaaagggtggtcggtaaataagagcaggctcttctcaatttttgaatacgttaaggcgatcaggccctgcctgagcaggctcattccgagtaaaaaaaccaggataagtgcggtaaagagaatcagtatcatcaaacgaaacacccctttccatcattatatagacaagcagccttattcatgacggaaaagtgagctcgcttagttgacctgactgatggcttatattataatgtcaaagtacatgtttatatatgtatctttttaaaggtagtcgattggtgtattcggagggagggaaagagaatgtcaaaaacggtcgttagaaaaaacgaatcgcttgaagatgctcttcgtcgcttcaaacgcagtgtatcaaagacaggtactttgcaagaagcaagaaagcgcgaattttatgaaaaacctagcgtaaagcgcaagaaaaagtcagaagctgctagaaaacgcaaattctaaaagagggtggatttatgagtcttcttgagcgacttaaccaagatatgaagctgtatatgaaaagccgtgagaaagacaaactgactgtcgttcgaatggtgaaagcttcacttcaaaacgaagcaattaagcttaagaaagacagtttgaccgaggatgaggaacttactgtcctatctcgtgaacttaagcaacgtaaagactccctccatgaattttcaaacgctaatcgtttagatttagtagataaagttcaaaaagagctggacattttagaagtttatttaccgaagcagctttctgaagaagagctgcagacaatcgtaaatgaaaccatcgctgaagtcggtgcgagctccaaagcggacatgggcaaagtgatgagtgctattatgcctaaagtaaaaggtaaagctgacggcagcgtaattaacagacttgtcagcagtcaattatcttaattgacaaaaaagacatctttccttgagagatgtctttttttatacataaaaaaatgaaactaaagtacatttgttacgtatataaagaagaacgaaatgggaaggagggtatatttgccttgttccgaaaaaaaaacggaattgctgttgctctattgggcttatttgtattatctttattaggggttcaattgaacgcgaaagctgatcacccatcggtttatgtcatcccggttgagaaaaatgtcgaacaggggctcgcctcgtttttatcgcgttctttcaaagaagcgaaggagtccggcgcgtcacacattattcttgacatcaatacaccgggaggcgccgttcaatcagccttggatattgcggatatcatcggccgcgcggatgtgcctgttaccgcttacgttaataaacgggcgctttctgccggagcgtatatagcgcttcaggcagatgaaatctatatggcgccgggcggaaaaatgggtgccgcagccatcatcgacggaaagggaaacgcggcagacaaaaaggcccaatcactgtggcatgcagaaatggaggacgcagcggttaaaaacaaccgaaatccgaaatacgccctagccatggcagatcccgccattaatgcaaaggaagcgggcgccccaaagggaaaactgctgacactgacagctgaaaaagccaaggaagtcggatattcggagggcacggtttcagaccttgatgctttatatacaaagctcggttttgacaaagcggatgttcaccatgcaaaagaaggtttcatcggcaaactgggcagatggctgacaaatccgtttgttgtccccgtcttattaacgcttgctttgcttggtttgaccattgaattgttctcgccgggcctcgggataccgggtgccgtcggactgacggccatgctgctgtttttcacggggcatatcgctgccggattcgccggctatgacagcgtattcttattttgcgcgggcttggtttttatccttttagagatatttctgcccggaggcataatcggtcttatcggtattgcaggcgtcatcgcgagcctctttctcgctgcgggcagctttaccgtcatggcggtttctctcttgatcgccattgctgtgtctattacagcctttatcatattaacaagggtgttggggaaacgaatgaaattctttaaaaaattaatattaactgattcaacaagcacggagagcggttatgtttcaaatcagaaccggacggagctgttgggaaaagtcggcgttaccgctacagccctcagaccgtcaggcaccgtcattattgatgatgaacgtctggatgtcgtctcggaaggatcattcactgaaaaagacagacaggtgaaagtagtgaaagcggaaggctcacgcattgtcgtgagagaaatatagatgataaccttgaggaggaattagatggaactgtcaagtttggcgattttagcattagttgctgctgccattattgtgttagccatattcttcacctttgtaccggtgatgctatggatttcggcgcttgcggcaggagtcagaatcagcattttcactttggtcgggatgaggctgcggcgcgtcataccaagccgcgttgtcaatccgttaattaaagcgcacaaagccggcctatccgcaacaacaaatcagctcgaaagccattatctggccggaggtaatgtcgacagggtggtcaatgccctgattgcggcacagcgcgccaatattgagctgtcatttgaacgctgcgcagccattgacctggccgggcgtgacgtattggaagccgtacagatgagcgttaatccgaaggtcattgaaacaccgtttatcgcgggtgtcgccatggacggaattgaagtaaaagcaaaagccagaatcacggttagagccaatattgagcgccttgtcggaggagcgggagaagagacggttgtcgcccgtgtcggagaagggattgtctcgacaatcggttcttcacacaatcataaaaaagtgcttgaaaaccctgatatgatttcgcagaccgtacttggcaaagggctggattcaggcaccgcatttgaaattctttcgattgacatcgccgacgtggatatcggcaaaaacatcggagcgattcttcagacggatcaggcagaagcagacaaaaacattgcgcaggccaaagccgaagagcgccgcgccatggcggtcgcccaagagcaggaaatgcgcgctcgcgtagaagaaatgcgtgcaaaagtcgtggaagcagaagccgaagtgccgcttgcgatggcagaagcgttgcgtgaaggaaacatcggcgtcatggactatatgaacataaaaaatatcgacgcggatacggacatgagggattctatcggcaagctgacgaatgaccagcaagatgaagaccaacaataacctctctattaaggagggagccgctatatgcacgagattctgacaaatccgctcgtcattgccgccgtcatcggcattatatcggcaatattcggcaagaaaaacaaagatgaaaaacgtccgccgggtacacgtcccggaaatcaggcaaaaaagcaggatcaaaaacagccgcagaaagagcataagccggaagcggaagaattgcctgccgtttcagaagagaacccttttgagcaaaaaagaagggaagctgaaaagcgcctagcggagacggagcagatgtttaacgggctcgaacataagctgacatccgcacgcgcacgaaacgcgtctctgaagaaatcagccctcaaaataaataaagaaactgcggtccaaggcattatattcagtgaggttttgggtccgccccgtgcaaaaaaaccgcaccggaccatgcggaacatcggtaaaaaataaagtgttagaaccccttttcaaatcatacatatgagatgaaagggggttctttttttatggggcaaagaaagaatcgtgtaaaggcatggctgacaagagcattggaaattcccccggacgttatgatggatctgcctcgtattacgatggtcggcagacttcatatctacatagagaatcacagaggcctcctgctgttcagtgaagaagaagtcaggctgatgctcaagcaggggcagtgtatcatatcaggaaaaaacttggtcattaaggcaatccttcctgaggaaatccttttggaaggcacgatagatcacgtacgatatgtcgattcataaagccgggggggaataatgtgaaaaacaaatggctgtcatttttttcgggtaaagtccaaatggaagtcaaaggaaaagggattgaacggctgctgaatgaatgcacgagaaacggaatcgccatctttgcggtgaaaaaaaagcaagactgtgttctgctgatgattcagcttcaagatgtacatgctttcagaagagtcatcagaaaacatgaatgcaaagcaagctttacaaaaagaaagggtcttccctttctgcttctcaaatcaaaattaaatctgggcttcactgcgggatttgtgatattttttgttatattgtttcttttgtccaacatgatttgggaaattgatattaaaggggccaagccagaaaccgagcatcagatggtaaagcaccttgaagaaatcggtgtgaaaaaaggccgtttgcaatttttaatgatgacgccggaaaaaattcaaaaatcattaacaaacggcatcgataatattacgtgggtcggtgtggaattgaacgggacagcccttcatatgaaagtggtcgaaaagaacgaaccgacaaaagaaaagtacgtgagcccccgccatatcgttgccaaaaagaaggcggtcatcaaaaggatgttcgtgcaaaaggggcagccgatggcttttgtgaacgatcatgttgacaaaggacagctcctcgtctcaggactgatcggaaatgaagaccggaaagtcgcctcaaaagcggaaatttacggagaaacatggtacaagtcagaagtaaccgtgccccttgaaacatcatttacgctatatacgggtaaagtaaggacgaagcacaagctgtctttcggatcatggggcgtgcctttttggggcttcgggtttaatgaggagccgctgaaacatccgaaaacagaggaagaaaagcatccgtttcaatttctggggatgaagcttccggtttcttacgtttcagaacagacaagagaaagtgaaacatccgtgcggacttatacgaaaggcgaagcggttcaggccggtatcaaaatgggaagacaagatgtagaaaagcgattaaacggcagcggagaggtggaaagtgaaaaagttttgcaccaatccgttgagaatggtaaagtaaagttgattattctctaccaagttatagaagatatcgttcaaaccacacctattgttcagggagactaaagaatggcagaacatttacttgcgattaatcacaaactgaaaagcccggacgaagcactttctttgttcggcagccaagatgcttttttacatttaatggagagggatctgggcattagcctcatcacacgcggtgaaaccatttacgtttccgggaatgatgaaacatttgagatcgctgacagattattgggctcgctccttactttaattcgcaaggggatcgagatttcggaacgtgatgtgctgtatgccgtgaaaatggcaaaaaaagatgaactggactattttgaaagcatgtatgaagaggaaataacgaaaacggcaaaaggcaaaccgatccgtgtcaaaaccatcggccaaagagaatatgtggcggcgatgaagaaaaacgacatggtgttcggcatcgggccggcgggaaccggcaaaacttatttggcggtcgtaaaagcggtgcatgctttaaaaaacggccacattaaaaaaatcattttaacaagacccgctgtggaagccggcgagagcctcggttttctgcccggagatttaaaggaaaaagtagatccttatctgcgcccgctgtatgatgcgctccatgatgtgctcggaagcgaccatacggagcgtcttatggaaagaggggttatcgaaatcgccccgcttgcctatatgagagggcggacgcttgacgacgcgtatgtgattcttgatgaagcccagaataccactcccgctcaaatgaaaatgtttttgacgagattgggttttggctctaaaatgatcattacgggcgacgtaagccaaattgacctgccgaaaggcgtcacatcgggacttgcagtagcgaaggacatgctgaaggacgtaaacggcatctccgtgattgaacttgaccagacagatgtggtcaggcatccgcttgttgcaaaaattattgaagcttatgataagcaaaagtaatgcaaaaatgacccgatctcccgttatcgggtcatttttatatgatgtgttcctgatgtttcagggaggaggttcttgttttgaaaaagaagggaaagggcaaaagcgcccgggaacggttccgcagtttcagacatgcccgctcagcccatgtgctgctgtacctgctgctttcagcgatcatgtttggtttgctctttattcatgtaaaacctgaatcacttaatttggatttgtttgcagtcagtgataagacgatttacgcgcccgccacagtggaagatcagcaggcgacggaatcgaaaaaacaggcggccgaagatgcggtggaagatcaatacactctgaaaaaaggctataccgacaatcggcttgacctgattacttccatttttgacagcatcggcgaagtgaaaaaagatgcggaaaaagacaaaaagtcaccttcggaaaaatcactggtaaaatcggtgaaaaacaagctgacacaggatgtcaatgaatctgtctcggaagatgccattaaatcgcttctccatgcaaacaatgaagatttctcatttgtgagggattccgtcattaccgcggtgaatacggtgatgagcagtgaaattccttctgaaaagcttgctgaagcgaaggataaggtcgcaaaagagctgaaaagcgcttctgtgccgtcaaaatatttagcggctgcgactgaaatcggaaaatacgcggtcatcccgaattacgtttttgatccgaaagcgaccgatgaaaaacgccaggaagcgtcagacagcgtccagccggtacagatcaaacagggacaggttctcgtggaagagaatgacctgattgaccgggaagtatacaggaagcttgaactgacgggtcttttgaataattccaacctgttaaaaccgatcagcggtctccttctgatgatcggcctgtttattgccacgcttgtctactattttgagaaacagcagcaggagcttaagctgaaaaataaatctcttttgctgttttctatcattacaacgcttattctcgtcattatggaagtcgtcagtctctttcagaagattgaatacaccaatatcggctatcttgtgccgatcgccgccggcgcgattttaatcaggctgctgctcaatgaaaggctcgccattttaggaagcatcattctggcgatctgcggcagtatgatgtttaatcagggtgtgacgggaacatttaattacgtcatcggcatttactatttaatcagcagcatttcaggcattctgtttttgggaaaacataatgcgagatcaaaaatattgcagacgggactgttcgtctcatttattaatatgattatcgtgctgtcgcttttattaatacaaaatacggcgctgtcaccggttgaaatcggaacgctgatgctgatgggggtcgtctcgggacttgcttcatccgttttgattatcggtctgatgccgttttttgagacgggattcggcattctttcaacaatgaggctgattgaactgtctaatccgaatcatcccctgcttcgaaagattttaacggaaacacccggtacatatcatcacagcgtcatggtggcaaatctgtcggaagcggcttgtgaagccgtaggggcaaacggtcttttagcacgggtcggagcgtattatcacgatctcggcaaaacgaaacgtccgcaatattttattgaaaatcagatgaatatggataatccgcatgacaagctgtctcctcagctcagcaaaaatatcattattgcacatacgacagacggtgcgaatatgctcagaagctataagtttccgaaagagcttgtggatatcgcggagcagcatcacggaacgtcccttttaaaattcttttattataaagcgaaagaaaagggcgaccagattacagagaaagagttccgctacccggggccgaagccgcaatcgaaagaagcggctattatctcagtggccgacagcgttgaagccgccgtccgttccatgcataatcccaatcccgagcggatcgaaaaactggtgcggggaattatatccgataagcttcaggacggacaattctcagaatgtgatctcacgttccgagaactggatacgatcgcaaaaacactatgtgcgactttaaaaggaattttccactcccggattgaatatccggaggctacgaagaaggtgaaataaatgagtttactcatagatattgttgatgaaacgaacagcgtctcagctgatgcgctccaagaagtggagaagctgctccaattcgcggcggaaaaagaaggcattcaggaccaggctgaagtatcggtcacgattgtgacaaatgaggaaatcagagaaatcaacagagactaccggggaaaagacactccgactgacgtcatttcgtttgcgcttgaagaagaaggcgaagacgaggttgaaatcataggcgccgacatgccgcctgttttaggagatattatcatcagcgcagacagaacgaaagagcaggcggaagagtacggccattcgtttatgagagagctcggttttctggccgtgcacggctttttgcatttgcttggctatgatcacatgacaaaagaagaagaggaagaaatgttttcaaagcaaaaggatttgctggatgagtatggactcacgagatcataaaaacgagtggagcaggttcctgaagagctttgtccatgcatggaggggaatctggaaaacggcgcggtcagagcggaattttcaatttcatattaccgcggcctgcgccgttatcgtttgcggttttctcaccgggctgagcacagccgaatgggccgttgttttggtgctgatcggagggatgcttgctttggagcttttaaatacggcgatagagcatgttgtggatttagttaccgatcagtatcacccgctcgcaaaagcggcaaaggacgcggccgccggagccgtttgcgtctttgccgtgatatcgtgtatcattggtttactcatcttcttgccgaagatatgttagcagaagattcttacaattattttacattgccaaaaatgggcgtgaaaaaccaatcataattatgtaaaataaaagtgacagcggtatcatacaggataaaggtaagagaggaattaagtacacatgaacagacaagaattgattgcagaagcattaaaagcgcgggacacagcgtatgtgccgtattcaaatttcagagtgggagccgctcttcttaccaaagacggaaaagtgtacagaggctgcaacatcgaaaatgcggcatacagcatgtgcaactgtgctgaacgcacggcgatattcaaagctgtttccgagggggatacggaatttgcgatgctcgccgtggctgcggatactccgggaccggtttcgccgtgcggagcctgcagacaagtaatttccgagctgtgctcaaaggatatgcttgttattctgaccaacttacaaggacaaataaaagaaatgactgcggaagaattattaccgggcgcattttcatcggaggatttacatgacgaacgaaagctttaaatcaggatttgtatctatcatcggaaggccgaatgtaggaaagtctacctttttaaacagggtcatcggtcaaaagatcgccatcatgagcgacaaaccccagacgacaagaaataaagtccaaggggtgctgacaaccggcacgtcgcagaccatttttattgatacaccgggcattcacaaaccaaagcacaagcttggcgactttatgatgaaagtggcgcagaatacgctgaaagaagttgacttggtgttatttatgattaacgccgaagaagggtacggaaaaggagacgagtttatcattgaaaagctcggacagacgtctacaccggtctttctgatcgtaaacaaaattgataagatccaccctgaccagctgcttcttttaattgatgagtaccgtacgcgctatccgtttaaagaaatcgtgccgatctcagctttggaagggaacaacgtcgaaacccttctcgcgcagattgaagcgtatttaccggaagggcctcagttctatccgagcgatcaggtgactgaccaccccgagcggttcattatttctgaactgatcagagaaaaggtgctccatctgacaagggaagaagtgccgcacagcatcgctgtcgctatcgagtccattaaagggcaggaaaacggctccgtccatgtcgctgccaccattgtggtcgagcgggattctcaaaaaggcatcgtcatcggcaaaaaaggagcgcttctgaaagaagtcggcaaaagagcgcgggctgatattgaagctcttttgggctcacgcgtttacctggaattatgggtgaaggtgcagaaggactggcggaataaaatgtctcagctgcgtgatttcggcttcaaagaggatgaatattaattcatctaaggcgcatgcctgaggtgtgagattacctcacagaagcagggattcgttagcaaaatttgtttaacatgaaaaggaggacatcaggtcaagataagggtaagaatttggatttgcaagctagtttaatgatgaaaggtgggttttttgtgttgaattttacctggaacgtattttctcaaacaggaagtgttgatacgtaccttctttttaaagaactggaaaaagagaacctggaaagacccgaagaaccggaagatgagctagcccgaattgattttccaattttgtaaacctcttggcccctcccattgttggaaggtgcggaaatgctgactaaatgtgaaggaatcgtgctccgtacgaatgactacggggagacgaataaaatcgtgacattgctgacgagggaacacggcaaaatcggcgtcatggcaaggggcgccaggaagtcagccagccggctgtcagcagtcagccagccgtttttgtacgggtcatttttaatgcaaagaacatccggactcggcacgctccagcagggtgaaatgattctcagcatgagaacgatcagagaagatttatttttgacggcgtatgccgcttttatcgctgaactcactgacaaaggaacggaagagaagaaaccgaacccctatttattcgaattgattctcgaatcctttaagaggctgaatgacgggactgacccggacgtgatcaccttcatcgtgcagatgaaaatgctcggcgtcatggggctgtatccggagctgaatcattgtgtccactgcaaaagcggggaaggaacgtttcatttttcgataagagataacgggtttatctgccaccgctgctttgaaaaggatccgtacagagttccgatttcgccgcaaacggcaaggctgctaaggcttttttattactttgatatcggaaggctcggcagcgtctcgttaaaacaggaaaccaaaaacgaaattaaacgggtcattgatctgtattacgaggaatattcaggactttatttaaagtcaaaacggtttttagatcagatggaaagcatgaagaaccttttggatgaaaacaaaagttgacattctgcccatctttttatatgatcatttattataaaatatgttgcagtgacagaaagaagtacttgcgtccaactcatacaagcgaccttagggcagtgtaagctaaggatgagcgcgcaacgaaaggcattctcgagcaaccctttaaaaagaggctgagtgattcacatcctcagcaactagggtggaaccgcgggagaactctcgtccctatgtttgcggccggcaagcatagagacgggagttttttggttgccgccgcacttgtaaaagaatggagaaagtggaggtgcttgaaatgaacattcaagatatgattttaaccttgcagaagcactggtcgaatgaaggctgtgtgctcatgcagtcgtatgatgtggagaaaggcgcaggcacaatgagcccgtatacatttttacgaagcatcgggccggaaccgtggagagtggcttacgttgagccgtccagacggcctgcggacggacggtacggtgaaaacccgaacaggctctatcagcatcatcaattccaagtcattatcaagccgtcgcctgataacattcaagagctttaccttgattcattgcgtgcgctcggcattgacccgcttgaacatgatatccgtttcgtagaagacaactgggaaaacccgtctttaggctgtgcaggtctcggctgggaagtatggcttgacgggatggaaattactcagtttacatacttccagcaggtgggcggaattgaatgtaaaccggtatccgttgagatcacgtatggtattgaacgtctcgcgtcatatattcaggataaagaaaacgtctttgatcttgaatggacgtcaggatttactgtgaaagatttatttatgatggctgaatatgagcattccgtttatacttttgaaacatctgacgtggatatgcttttccatttgttcagcacctatgaaaaagaagcgatcagacaaatggataacgggctcgtgcatccggcctatgattatgtgctgaaatgctctcacacatttaatctgctcgatgcaaaaggcgcgatctcggtgacggagcggacgggttatatcggccgtgtccgcaacttagcgagaaaagtggcaaaaacgtattatgaagaacgggaaaaattagggttcccaatgcttaaagaggagggctcttcccatgagtaaacaagacttgcttttagagatcggactcgaggaaatgccggcgcggtttttacatgacagcatggtgcagctcggtgaaaagctgaccgactggctggctgaaaaaaatatcgcccatggcgaagtgaaactttttaatacgccgagacgtctggcagtatatataaaagacgtagcagaaaaacaggctgatattcaggaagaagcaaaaggccctgcgaaaaaaatcgctctggatgctgacggaaactggacaaaagccgctatcggattttcaaaaggccaaggcgccggagtggatgatctgtatataaaagatgtaaacggcacggaatatgtcttcgttcaaaaattccaggcgggacaagagacgaagacacttttaccgcagctggaaaatttgattgccggaatgcattttccgaaaaacatgcgctggggcacgcaggatctgcgctatatccgtccgatcaaatggattatcgctctctttgggaaagacgtcattccgtttgaaatcacaaatgtcgagacgggccggaacacgcagggacaccgctttctcggccaagaagtatctgttgatgcaccgtcatcatacgaaaagctgctgaaagaacaaagcgtcattgctgacccgaaagaacgcaaacaaatgatccaaagccagctggacgcgcttgcggccgagaagaaatggaacattccgatcgatgaggacctgctgaacgaagtcaaccatctggtggaatacccgacggcgctttacggatcttttgaatccgagtttctttctatccctgaagaagtacttgtaacaacaatgaaagagcatcagcgctacttcccggtaaaagatgaaaacgggaatctgctgcctcattttattacggtaagaaacgggaacagccatgcaattgaaaatgttgcccgcggaaacgagaaagtgctgagagcaaggctttcagatgctgcgttcttctacaaagaagaccaaaagctgaacattgatgaaaacgtgaagaaactggaaaatatcgttttccatgaagagctcggctcccttgaagataaagtaagaagagcggccgccattgcgggcaaacttgccgtccgcctgaaagcggatgaacagacgcaaaaccttgtgaagcgcgccgcagagatttctaaatttgacctggttacacatatgatctatgagttccctgagcttcagggcgtaatgggagaaaaatatgcgcgcatgctcggtgaagatgatgccgtcgctgccgctgtcaatgagcactatatgccgagagcggccgggggagaagtgccttcaacctttaccggcgcggtcgtggcgttagctgataaactggacacgattgcttccttcttcagcattgacgtaattccgacaggttctcaggatccgtacggattgcgccgtcaggcaagcggcatcgtttccattctgatcgaccgcaattggggcatttcgtttaaagagctgctgtcattgacagaaacggaaaaagaaaatgagctcctcgatttctttacacagcgtctgaaatacgtcttaaacgctgaagacatccgtcatgacgttattgaagccgttctggacagcacagagcttgagccgtatgcagccgttcataaggcaagagtgcttgagaagcacctcggcacacccggctttaaagaaacggctgaatcactcggccgggtcatctccatcagcaaaaaaggcgagagccgcgatgtcaagccggatctgtttgaaaatgaacaggagaaaaagctgtatgacgcttatcaaaaaacaaaagacagtgtcgcggaaagctttgcctccaaaaactatgaacaggcgcttgccgtgctcagcggattaaaggagccgattgaagactactttaatcacacgatggtaaatgcggacgatgaagcattaaaaaccaaccgtttagcgcaaatgaccgctcttgcagatgtgatcaagtcttttgctaatatgaatcatcttattgtaaaataaagaaaaagacggttgctgtgtgatcggcaatcgtcttttccccttttacataaacatcacagaatgaaaacatagataaagaaacccttccataaaggtggtgagtacgatcgaattaaataaacggcaagaacaaattttacagattgtaaaggaaaacggcccgattaccggagagcatatcgcagaacagctcaatttaacgagggccacgctgcggccggacttggccatactcaccatgtcaggcttcttagaggcccgtccgcgggtcggttatttttatacggggaaaacgggaaatcagctgcttgcggataaattgaaaaagctgcaagtgaaagattttcaatcgatccctgttgtcatcaatgagaatgtctcggtatacgatgccatctgcaccatgtttttagaagatgtcggcacgttatttgtcgtagatcgtgatgctgtcttagtcggtgtgctgtcacgcaaagatttgctgcgggcgagcatcggccagcaggaacttgcctcaataccggttcatattatcatgacaagaatgccgaatatcgccgtctgccggcgtgacgattatgtgatggacatcgccaagtatttaattgaaaaacagatcgatgccctgcccgttattaaagatacggataaaggctttgaggtcatcggccggtttaccaaaacgaatatgactaagatacttgtcagtttatcagaaaatgaaatcatataagcttgaaaactaacggggggataacatggacaatcgcatcatttatgtagtatcagactcagtcggagaaaccgccgaactcgttgtaaaagcctcgctcagccagtttaacggctcagccgatgatacgcatatcagaagaataccttatgtggaagatatcggcaccattaatgaagtcgtgtctctcgccaaagcggacggcggcattatttgttttacgctcgttgttcctgaaatgcgcaaatacctggttgaacaagcggaaaaagcgaatgtgctgtattacgatattatcggtccgctcatcgataaaatggaatcggcttacggtctgaccgctaaatatgaaccgggccgcgtccgccagcttgatgaagattatttcaaaaaggtcgaggcgatcgagtttgccgtcaaatatgacgatggcagagatccaagaggcattttaaaagccgatatcatcctgctcggagtatccagaacgtctaaaaccccattatcacaatatcttgcccataagcgtctgaaagtggccaatgtgccgatcgttcctgaggtcgatccgccggaagaactgttcagcgttgatccgaaaaaatgcatcggcttaaaaatcagccctgataaactgaaccatatacgaaaagaacggttaaaatctctcggcttaaatgacaaagccatttacgccaatatcaacagaattaaagaagagctggagtattttgagaaaatcgtggaccggatcggctgccaagtcgttgacgtttcgaataaagcggtcgaggaaacagcgaacatcattcatcatctcaaaacaaagggccgataactcaggacgctttatcctgggtttttgggtatgcaaatagggaataaacaaaaaggatggcatctttgcgaagtttgtattataataaaaaattgtgataaaatgtttatttttaggtttaagcttcgtgtgatacgaataaactattatgggtaagatgtcaagaataactcccggaaatttttcgacaaagctcaaaatagatccgcagtcatggagcatatgcgatttcgcttgtttttatgcaggagattgatggagggatggagaattagtcttctaaatgaaaaagaaaagacgatttttgtcgatgcagacgcatgccccgtaaaagaggaaataatgctcattgcatcgcaatacagcgttcgggttattttcgtcgcatcatttgaacactaccagctttccagaagcaaagacgagaactgggtatacgttgatcctcataaagaagcggcagacttatatatcgcaaactatgtgagatcgggagacgtcgtagtcacgcaggatatcggtttagcctctcttttgctgaacagaaatattgccgtcttatcggaaaggggccgttcttatactgaagacacgattgacttcgctctgatgagccgtcatatgtcaggcaaaatgagaagaagcggcattcattccaaaggacctaaaaaattaaataaagaagatcggaatcgatttgttaccctgcttaaaaaaatcctgtcgaatgatgaagggatttcaaatcaaaacatcgaataatgtacgacggagtgttataagatgggaaaccgcataccagatgaagtagttaatcaggtgcagcagtcagcagacattgttgaagtcataggtgattatgtccaattgaaaaagcaaggccgcaactactttgggctctgtccgtttcacggggaaaacacgccctcgttttccgtctccagcgataagcagatctttcattgcttcggatgcggtgcgggcgggaacgttttctctttcttacggcagatggaaggttattcatttacggaagctgtttctcaccttgcggataaatatcagattgatttccctgatgatataacgattcactctgcatccaggccggaatcttccggagagcagaagatggcggaagcccacgagcttctgaagaaattttaccatcatttgctaataaatacaaaggaaggccaggaagcgttagattaccttttatcaaggggttttacgaaagagctcatagatgagtttgaaatcggctacgcgctggattcctgggatttcatgacgaaattcttgaaaaagcgcggttttgaggaagaactgatggaaaaagcgggtctgctgatcagaagggaagacggcagcgggtattttgaccgtttcagaaacagaattatgtttcccattcatgatcaccacggagccgtggcggctttttcaggaagggcgctcggaagccagcagccgaaatatatgaacagcccggaaacgccgctgtttcataaatctaagctgctgtataactttcataaggcgcgcctgccgatcaggaaagaggagagagccgttctgtttgaaggcttcgctgacgtcatatccgccgtcagctcaggcgtaaaagaaagtatcgccacaatggggacgtcgctcaccgaagaacatgtgaaaatcctcaggagaaatgttcaggaggtcattctctgctacgattcggataaagccgggtacgaagctacgctgaaagcggccggcctgctccagaaagccgattgtaaggtaagagtaagcatgctgcctgacgggcttgatcctgatgattatatcagaacccggggcggagaaaaattccggaccgatatcattgatgcaagcgttacggtcatggcttttaaaatgcagtatttccgcaaagggaaaaacttatctgacgaaggagaccggctcgcttacatgaaagaagtgctgaaagaaatcagcgctctttccgggtcgcttgagcaggaaatgtatgtgaagcagctcgcctcagaattttctctttcggtagaatctttgactgaacagctttccatctacgccagacaaaacgcccccggcgacaaaaacgccgaaccgcagacaagacgggcccgggtgacgacaaaagcgaaacggcgccgtctccgtcccgcctatgagaacgcggaaagacttctgctcgctcatatgctgagagaccgaaacgtcataaagaaagtgattgagcgtgtcggctttgaatttaacattgacggacatcgtgcgctggcagcatacctgtacgctgtttatgaagagggcgctgacatgacgccgcagcatcttatggcgagaatgcaggatgaggaaatcagccagctgctttcagatatagggatgctccaagtaaacgaggagctctcagaggccgagttatccgattacgtaaaaaaagtgttggatcaccgaaaatggtcaatgataaaggaaaaagaagcagaaagagcggatgcggagaggcagaaagacttcgtgaaagctgcgtctctggctcaagaaattgttgcattgaaccgatcattaaagtaacaccacaaagaggcttgcgttctgattggcaatgattccttgcggaggagcaaatagatcgcttaacctcatcatgaattgtcatttattatccgcagccctgcatgctgaaaaagagagaaggcttccgggtcggataagaaacataccgcttttagaattcgttgcaagctttggaaggagggatccataatggctgataaacaaacccacgaaacagaaacagaacttacattagaccaggtaaaagagcagcttactgaaactggaaaaaaacgtggcgttttaacatatgaagaaattgctgaacgcatgtccagctttgaaattgaatcagaccaaatggatgagtattatgaatttttaggagaacaaggtgttgaattaattagtgaaaatgaagaaacggaagatcctaatattcaacagcttgccaaagccgaagaagaatttgaccttaatgacctcagcgtaccgcctggcgtaaagatcaatgatccagtccgcatgtaccttaaggaaatcggacgggtaaatcttctttctgctaaagaagaaatcacctacgctcaaaaaattgaagagggtgacgaggaatctaaacgcagactggctgaagcaaaccttcgtttagttgtcagcattgctaaacggtatgtcggccgcggcatgcttttcttagacttgatccaagaaggaaacatgggtctcatgaaagccgtcgagaagtttgactaccgtaaaggatataaattcagtacgtatgcgacttggtggatcagacaggcgattacacgcgccatcgctgaccaggcgagaacaatccgtatcccggttcacatggtggaaaccatcaacaaattaatccgggtgcagcgtcagcttcttcaggatcttggcagagagccgacaccggaagagattgctgaagacatggatcttacgcctgaaaaagtccgtgaaatattaaaaattgctcaagagcctgtttctttagaaacgccgatcggtgaagaggacgactcacatctcggtgatttcatcgaagaccaggaagcgacatctccgtcggatcatgcggcatatgagcttttaaaagaacagctggaagatgtgctggatacgttgacagatcgtgaagaaaacgtgctgcgtctccgtttcggtctggatgacggacgcacaagaactttggaagaagtaggcaaagtgtttggagtaacgagagagcgtattcgccaaattgaagcaaaagcgcttcgcaaattgagacatccgagcagaagcaaacgtctgaaggattttctcgaatagaatggaacgggtctttttgatccgttcttttttatgtataagatatatggataatatacctttattttactggataagcatatgttttgcaaatgagtttggaaaaaatgcggcatgtcctgaaagggggaaaatgagataagtttatttatattctttattgtaagcgtatacaattcattatacaatagaataaagataattttgtgataaacaaaacagttatttttgctttttgtataaattgtgaaatcaatgaaattgctgagcaagaccatttactttttgtaaaaataagttagaattagaagtgtttacatagggggagaatgaaaaagggggatggagatatgaagtggaatccgctgattccttttttgctcattgcagtgctgggaatagggctgactttctttttagctgtaaaaggcaatggagatgcgcatcagatcgcaagcggcggtgaaagcaaaaatgccgagaaggaaactgcaaacgcttcacctgaagagatttataaagcgaactgcatcacctgtcacggggaaaactatgaaggtgtatcagggccgaacttaaaaggcgtcggcaaaagaaaagatgtcgctgagattaaaacaaaaattgaaaaaggcggcaacgggatgcccgcgggccttgtgccggccgaaaagctggatgacatggcaaaatgggtttctgacattaaataaagctttaccggtccctatataaaagacatatgaaaaactctatccgccgcttggattccgggcggtttttttatatgatagtaaaggaaaaagaacctgagaaaagttgtgatattgtgaatgaaatgaagttatctaaaagattgcagtctgtggcggaatatatccctccgggtgccctggttgctgatatcgggtcggaccacgcgtatcttccttgctatgccgttttgaatcatttggcaagccgggcaatcgccggtgaaattacagacggaccgtttctatccgccaaacagcaggtggaaaaactggacttaagcactcttatctccgtaaggaaaggtgacgggctgagcgtccttgaaaaaggagaagccggcgccattacaatcgctggcatgggcggagcgctgatcgctcatattttggagtccggaaaaacgaaattgacggggcgtgaacggctgattctgcagccgaatattcatgccgttcatataagagagtggctgtatcaggaaggctatgaactgattgatgaagtgattctcgaagaagacggaaagtgttatgaaatcctcgttgcggaaactggcgaccgtgatgcgccgtatcgggacgtgccgatggctgccggaatgcttgcgggtccgtttttattaaaagagaggaatgaagtgtttcttcggaaatggagccaggaacttaagcatactgaacaaatttatgaacagatcagccgcagcgcaaagcatgaaagtcatgaaaaattagctgaattgaaagagcggatttctctgctgaaggaggtaatcggacatgcctaaacatgtaaacggacaggaaatcatccagctgtttgaacaattttcaccgaaggcttttgcggtggaaggagataaaatcggcctgcagatcggtacattgaataagccggtgaaaaatgtcatggtgacactggatgttctggaacaaacggtagatgaagccattgagaaaaaagttgacttaattatcgcccaccatccgccgatttttcggccgcttaaacagatcaccactgatcagcctggcggaagactgattgagaaatgtataaagcatgatattgccgtatatgcggctcatacgaatcttgatgtggcggacggcggtgtgaatgatctgcttgccgaagctctcggcctgacagacacagaagtgcttgtcccgacatattcggacccgatgaaaaagcttgccgtctatgttccgaaagactatgaagaagctgtaagaaccgcacttggcaacgccggagcgggacatatcggcaattacagccattgcgcgttctcctctgagggaatcggcagctttaagccgctggacggggcagaaccgtttatcggacagacgggagaactggagctcgtccatgaagtgagacttgagaccgtttttccggcaagtatggagaaaaccgtcgtaaaagcgctgaaaaaaagccatccgtatgaagaggtggcatatgatatttatccggtggagcagtctccgcttgaaaaaggactcggccgcatcggaaaacttcagcaagacatgacgcttgaagagtttgctctgtttgtgaaagaaaagtttgacgttaacggagtccggatggtcggagagcgaaacagcaaggtgaaaaaagtcgcggttcttggcggtgacggaaataaatatatttatcaggcaaagcggaaaggtgcagatgtttacgtgacgggcgatctttatttccatgtagcgcatgatgcgatgatgatgggattaaacgttgtggatccggggcattatgctgaaaagatcatgagaaaaggcacggctgagaagcttacggcaatggcaggagagaaaaactatgatgtgcgcattttcgcttccgaaacagatacaaacccatttaccttcttataaaaaaactgaggccccgggcctcagtcttttatttttactttcggaaggatttttttaagcggcacactgtgttcaagctgccatgtcgattcatcgttgtggtcaaactgctctaaaaagcggatgacttcctttgtaatcggtgtcggtgttgatgcgcctgcggtaacggcgacggtattgacgtctttcagccattcgagcttcagttcactgatgtctccgattcggtaggcttttgttccggcgatttcttctgacacttgcgccagtctgttggagttattgcttttcggatcaccgacaacaatggttaagtccgctttttttgcctgctctgatacagcttcttgacgaacctgtgtggccaggcagatttcctgatggtattccacgtacgggtacttttctttgactgattccataatatcgtggacgtcccactgggacattgtcgtttggtttgtaacgattaatttctcagcctgaatatcgagatttctcacgtcttcctctgtttcaacgagatgaacgatttcaggagcgacgccgacagctccttcaggctcggggtggccttttttaccgatgtatatgacgtgataaccttcagcttttactttccggattaagtcatgtgttttcgtgacgtccgggcatgtggcgtcaatcgtaacaagccctttttcctcagcggcttttcttacttccggagataccccgtgagccgtgaaaataacggttcctttttccacctgctttaaaatctccagacggtttgtgccgtcaagcgtgtaaatgccgtcttcctcaaacgcatctgtgacatgcttattatgaacaatcattccgagtatatatataggtcttggcagtgttttatcgagtgacgcgtttttggctatgaccatggcatcaacaacgccgtaacagtagccgcgcggcgatattttgataacgtccaatgtagatgtcctcctatcaaaagtgagtgtagaggcaatataaaaagccgtagttaaacggctcaaatcttgcattcttctgatctcattatagctaatctttcgtgagatatcaaagaatgttaaatatataatttcggctttgatctgcccgatgttctttttggacgcggctgttccgctgagtctgcctgtgcggcgtctttttcttttgaagcggatgctttttcagacgtcttctttgatgttttggatgaggcgtctgatttgttttcatcttctgtttcatctgttttttcagcttcatcctttttgtcctgttcgtctgtttctttcgtctcgtcagattcattctcgtcatcactgctgcttaattggctgtaaagcttcatcatggcgggcagactccgtactaaaggaccgtactgctggatcatcggcgtaacctgctgcgccacgccgagcaccttctgaacgttgccgagcatgttcgacagggatgccggacttgccaggttctgtattccctgcagtcctgcacctgctcctccgctggccgccgccggtgccgacgcggcagcgcttcctcctcctgaaccgggtaaaaaacgggaaagcataccttttaagccccctccgccgcccgtgcctgcgtttctcaggcccgctccggcaatctgctgctgagggaaaagctgccggccctgctgcattagctgccgtcccggcaatgacggtcttcctcccatcatcatacgcggattcataaacggccgtccctgctgcgccatatttctcatcggctgctgtggaaacatacttgtacctcctttctgtctctctgctattacaatatgcatcggagggggcatttgcttttctgtctcgaaaacaggattcccccaagacatggtgtttttaagtaaaatcggttataatgtgatgatggacacagaatgtgccgctttaaggagctgggaaaaatgaaagaaactaaatttgatggatacaacttaaaaccgtttattatagatgcagttcaccgccttggtttttatgaaccgacagatattcaaaagcgtctgatacctgccgtactgaaaaacgaaagcgtgatcgggcagtcccagacggggacggggaaaacccacgcctatttattgccaattttgaatcggattgatccgggttctgatacggtacaggctgttatcacggcgccgacgagagagcttgccaatcagattcatcaggaagcactcaaaatcacacagggtgcggaagatgagccgatccggacaaaatgcttcatcggcgggacggacaagcaaaaatcaattgataagctgaaaacacagcctcatctcgtcgtcggaacgccgggccggatcgcggatctgattaaggcgcaggcattgaacgtctataaagcgcagtctctcgtcattgacgaagctgatctgatgcttgacatgggctttttagaagacgttgattacatcggatcgcgtatgccggaagaacttcagatgcttgtgttctcagctacgattccggaaaagctgaagccgtttttgaaaaagtatatggaaaatccgaagtacgcgcatgttgagccgaaaagaatcacagccgaaaagattgaacatgttttggttccttctaaacagcgtgataaagacaaactgctttttgatatgatgtctcatctgaacccttatctgggcattgtgtttgcaaatacgaaaaacacggctgaccatattgcgaaatacctgactgaaaagggcatgaggatcggtcttctgcacgggggattaacgccgcgtgagcgtaagaaggtaatgaagcagattaatgatctggaattcacttatgtcattgcgacagaccttgcggcaagaggaattgacattaaaggcgtaagccacgtcatcaactatgagcttccggacgatctggatttttatgttcaccgcgtcgggagaaccgcacgcgcgggttcatcaggccaagcactgaccatttatgagctttctgacgaagatgcgctcgtaagactcgaaaagatgggtattgtgtttgactatgcggagcttgtaaacggcgaatggaagaaaggcgatgaccgccaccgccgcaaaaaacgcaaaaaatcggagaatgaggctgaccaaatggcgaagcgcctcgtgaaaaaaccgaaaaaagtgaagccgggctataaaaagaaaatgagctacgaaatggaaaagataaaaagaaagcagagaagaaacaaatctaacaaaggaaagtaggggaatcgggttgctgaaaataggttcacacgtctcaatgagcggaaaacatatgctccttgccgcaagcaaggaagctgtttcgtacggggcgaatacatttatgatctatacaggcgctccccaaaacacgcgccgcaaaaaaattgaagacttgaatatcgaagagggccgcgcccatatgaaggaaaacggcatcgatgagattgtcgtgcatgcgccgtacatcattaacattggaaatacgacaaatccggcaacatttgagctgggcgttgattttctgcgttctgaaattgaaagaacggcagcgatcggcgcgagacagatcgtgcttcatccaggggcgcatgtcggagccggggctgagacgggcatcaaaaaaatcattgaaggtttaaacgaagtgattgttcccgggcaaaacgtgcagattgcgctggagacaatggcgggcaaaggatcagaatgcgggagaagctttgaagagctggccgagatcattgcgggagtcacgcataatgaacatctatccgtctgctttgacacttgccacacccatgacgccgggtatgatgtcgctaatgattttgacggtgttcttaacgagtttgataaaatcgtcggcatcgatcggataaaagtccttcatgttaacgacagtaaaaatgtcaaaggcgcccggaaagaccgccatgaaaatatcgggttcggagagatcggttttgacgctctgcagtacatcgttcatcacgagcagcttgccgatatcccgaaaatcctcgaaacaccgtatgtaggcgaagacaagaaaaataagaagccgccgtaccgttttgaaatcgaaatgctgaaagaaaagcagtttgataaggagcttcttgaaaaaatatcagctcaataagaaagaaaggaggggcgggtgtccctccttttttaccctgagaattgattgaaaagttcgtcaactttccgcgccgtttcttttgaagttatcgtttccacttttttcagcaggcgcagccgctcctgttcatcaaaaatattgatgttttttccgtgcatcagagccgctacctcagccgcttgacttcttgtaatgctgatcccgtattgcttggaatatttcagcagatcgtccgcagtgacttgattgagccgctgcaaaataattctttgtattaaaatcatcgatactttcacctctttagacataatgtattgagcagatcattaaaatgttacagcttttaatggtaaaataaagttgcttactgtttaaaatagttattataggaaaggagattttatgaccccaaataaacagcataaaagagaatcatttttacactttatcttcagggtcattatgattctgatcggggcgggttcagccgccgtaagtattgaattgtttctggtccctaataattttatcgacggaggcattatcggtgtttcattaattttagaccacctctttatgtccaatcccctcctcaattttgccttattcgttgtgttactcaacattccatttatgattttcggatataaatatatcggaaaaacatttctcatctctactgttatcggaatcgtcggtttagcgctgattgaatcctcattgcaccatgtggaggccattacgacccagcctattttggcgacggtattcggggggcttttgctcggtttcggggtaggccttgtcatccgaaacggaggctcgatggacggtactgaaatcctcggtatccttctcacgaaaaagctgcccttttcagtcggggaattcgttatgctcatcaatgtgtttattttcatttgggccggttttgtgttcggtccggagcaggcaatgtattctttcatgacttattatattgccatgaaaacgattgacgcggtcatccaggggcttgatgaaacaaaagcggtcattattgttgcagagcaatatgctgagatctcagatgcaatattgcaccggcttggacggggaaccactaagcttcagggaaaaggcggatatacggatgaaaccaaagaagtcatttacgcggtcgtgacaaggcttgaagtgactaaattgaaatccattgtgtttgaaattgataaaaacgcctttattacaatcatgaatacccatgaaacgaggggcggtaagttcaaaaccgcgattcactaggctttcatttacttttcatcattttataggtataatttgatacatcataagaaaatggcctgctgttcagacagctgccattttctttttggagcgataccgtgttgtaaaggggaggtcctcatgaacgtacaagaagcgttgaacctgctgaaagaaaaagggtataaatatacgagtaagcgagaagacatgctgcagctttttgctgattctgataaatatctgaccgccaaaaacgtgcttgccgcattaaatgacgactatccgggtctgagctttgataccatatacagaaatctttcgttatatgaagaactcggcattttggaaacgacggagctttccggagaaaaactgttccgttttacatgctcttatacccatcatcatcaccattttatctgtttaacctgcgggaaaacgaaggaaattgagtcctgtccgatggataagctgcacgatgatttggaagggtatgaaatcagcggccataagtttgaaatttacggcacctgtccggcgtgccgataaaaaacctcctgcttatacaggaggttttttcagcttttgacatgctgaaagctatgtttgtttttattaatccaggcgacggcttcaagccaattctgcaccctgataatattggaatcgatggggagctgattatatggggagttaaaaaggataaccggaatgcctgcttcttttgcgatcattgtcgcattgccgtggtgatcttcgaaaaataaatcaatgccgtgttttttgacggcttccactttgtgatggcctccgacaagctcaatgtgatcgtaatgaatgtcccggtttgcaaaccagtccagcgtaacatcttctaagtggccgcgtcttgccgtaatgtagatcaggcggtgctcttctttcagtccgtccagtgcctgcttggcaaattccgcgagcttcgcttctttatatatggctgcttcatgaacgttcatccattcccaaaattcctcgtctgtaatgttcaaaagcttcgtcagatcataatcagtcatatcatccaaggtaatggaaagatgaaatgagcggtttaaataagggacaaatgtatcctgtgccgtaactgtgccgtcaatatctatacctaaccgtaacatgtccacactcctataaattcatcccttcaagtgtaacataaacaattaacaataccagaaaagtttagcaaacatgaattcgtaaaaaacgcggaaactaaaaaagctcctttcataaaagaaaaagggggaattgaaggtggcatacgattacgaaaatcgaaaaggcaacgactactacgtggatcatggatcggaaggaaccgatatcacgcgtgatgtttattcagaagaaacagcggccgaaatttcagagccatatcgtgcttctgaccgggcagcagaccgtgatgataatcgggacggagtaagtgaaggccgggggatagggtatgcagcattggctatttctatcatttccctgtttgtgctccctgttttattaggggcatgcggcattatcgtcggctatatcgccagaagaagaggagcaggcgctttaggcggatgggcgatgggaatcggtattgtttcccttgtgctcggcatcttcattacaccgtttttttaacacaacgcaaaaaaagcttggcggaatatccgtcaagctttttgtgtttcttgttctgcttttgctttttccgcttcaagctttgcgtagtgttcttctgccagcttgtcgatttcttttttcagctcttcgaccatggtttcttcagggactttgcggacgatttggcctttgcggaaaagaagtccttcgccgcgcgcgccggcaatcccgatatcagcttctcttgcttcgcccggtccgttaacggcacatccgagaacggctactttaatcggcgctttgactttagaaatgtattcttccacttcatttgcgatgctgatgagatcaatttcgatccgtccgcatgtcgggcatgaaataagcgtagccgcgtttgaagcgagaccgaatgatttcagcagttctctggctacttttacttcttcaaccgggtcggcgctcagagagatccggagcgtgtttccgattcctttgcttaaaatcgctccgagtccggccgcgctttttaccgttccggcaaacagcgtgcccgattctgtaattccgaggtggagcggataatcaaatgcttttgatgctttttcgtatgcttctatggctagattgacgtcagacgctttcatgctgacgatgatgtcgtgaaagtcaaggtcttccaggattttgatatgatgaagcgcactctcaaccattccgtcagcagtcggatagccgtatttttctaaaatgcgtttttccaaagaacccgcgtttacgccgatccggatcggaattcctttttctttcgctgcttttacgacggcttccactttttcgcggcggccgatgtttcccgggttgattctgattttgtcggccccgccctcaattgcttttaatgcaagcttgtagtcaaaatgaatatcgacaacgagagggatggaaatttgttttttgatgtcggcaatcgcgttagcggcgcgttcgtccggacatgccacccggacaatttggcagccggcttcggctaaacggttgatttccgcaactgttgcttctacgtcgtgtgttttggtcgtcgtcatactctgaatgacgacttcgttatttccgcctattgttaaaggtcccactttgacgggacgcgtttttgtacgatgtgtgatttcactcacttgtcaatcgctccttaattgtagttaccgcttttgcaggctgagccttttacatgtcaggcaacttctatttacatgttatattgtaacagtgtatttgccgaactgacaagaaattaacgtttaattgcggtagacggggaatttataagcggtgcctgcctgaattgcgtttgcttttacattcggattcagcgcttcaaaatcttgcgcaatatcatctggcgctttatgtgcgccgactatcgacatcaccgtatcgccttttttgaccgtaaccgttctgtatgaagattcctgtcgggctggctgtgctgccgctgcgtatgctggaaggtcttgagaagggatcgtgccgattttaagatcgtaaaagataatgaatatcacaaataaactgccgaatacaaaagtaagccgcttcattccaaccgcctcccgcatacatttttacttcattgtatgcttgtcccattttgttcatgacaaaaaagaagaccgccgggggcagtctttgttacacagctgtttttcttggcggtatctcttttaagacgaggaaaaggatgataaagtttacaaaccaattcactaaaaattcactcggcaccgtaataacaagcgcgcgcatgatcgtaaagaatatggtcgaaagtgtaatggaataagccgaaagcttccagagctgctggtaattcaatgtctttctttgcgcatttttcaatatcaggccgatgacggcgagaaatgatacttcaatgaattttccggccgctgtcatgatgaacagcaaaatggacaggacagtgacgatcattgttttattttggtttaatgctgatatgatttctttttttgtgatatcagctggcatcagcgaataattcatttctgtcgcctgtccgtctacagcaagcaccattttatttttcaaaatgccgatcgcattttgtttcgccgctatttgtttcgcgccgtaagcatctgtcggatcaaacacgatgacgaacccgttcgcttccgtttccttagaggcggatgctttcgtctgcaattctccgtttgaaatgctgaaatcagggaaatctttctttaacacggttttgaaaccgttcattgagtttacggtgcctgaggaaaggtaataagcgcttggcagcgtaaaaaggacagacagcaaaaatacataaaggatcgcttttcctatcccctgaaaacgtgtttttgcaatatccgccggagagtatgtacttttcaataaagccgtaaatatgttcaacatcttcacttcctagcctaaactggtatatgttgcttattgtatcgttcacaggggatgaacacaagtgagagtatttaaagcggtgataaggaatcatacataataagataaagcgggaagcggtgatcgcccgcaaaacaaaggagggtgtttttttcatgagtgttttgtattggctgattatcattgcggtcttcgtcattgcttttatcgggcttgtatatccggtgattccaagcgttatttttattgtggccggttttcttctctacggatttttgttttccttcagtccttattcttacctgttttggctcattgaggcggtatttgcggccgttttattcgcagctgactatgtgtcaaatttacttggcgttaaaaggtacggaggaagcagggcggcaatctggggaagcacgatcggattattgatcggacccttcgttattcccgtggcaggcattatattaggcccgtttatcggtgctctctgcgctgaggtgtttgttcatcaaaaggatatcaagtccgcggcaaaagtggggctcggctcgttaatcggctttttaacaagcgtggcggcaaaaggcgtcattcagctctttatgatcgggtatttcttatggacggtgctttagaaaggtttaatttcggccgtgaacggataaagtgtaatatgtctgctggaatcgccggattgtgagctttttcattgattaccacgctttcttttgttacattgagattagaaaagttcgcgttaagcggcatttcagtacatatatttaaaggaggaaaaaattatggcttacaaacttccagaattgccttacgcttatgatgctttagaacctcatatcgataaggaaacgatgacgattcaccatacgaagcaccataacacatacgtgacaaacctcaacaaagcgatcgaaggatctgcgcttgcagagaaatctgtagatgagcttgttgctgatttgaacgcagtgccggaggacatccgcacggcagtccgcaacaatggcggcggacatgcaaaccactctttattctggactcttttatctccgaacggcggaggcgaaccgactggtgagcttgctgaagagatcaaaagcacgttcggaagcttcgatcaatttaaagaaaaattcgccgcagcagctgcaggccgtttcggttcaggctgggcttggctcgttgtaaacaacggcaaacttgaaattacaagcacgccaaaccaagattcaccgctttcagaaggtaaaacacctgttctcggtcttgatgtttgggagcacgcgtactacctgaactaccaaaaccgccgtcctgattacatttcagctttctggaatgttgtgaactgggatgaagttgcccgtctttacagcgaagcaaaataattgagttgaatgatcacaaggtctcccgcgggaggccttgtttttttattgactttgattccttttacatatctcagtttgagtgagacaaactaatgtgtagtaaaggggagtcaatgatgagcaaaataaaaaaaattatcggcgacatcgaaataaataaagggctgctgctgttattgacgattggcggcctttactcattgggcatcgcgctgtcaaatacatttgtcaacgtgtatttgtggaagcagtcgggaaaatttattgatttggccatatacaatttgtcggtcgtaacgatgcagccggttacctttctgctggcgggccggctggctaaaaaaattgacagggtgtttattctaaggttcggcgttatctttttggccgctttttatttaagtgtgctgcttgccggagaaactgcggcttcccgtctcgttttgataggggccgtgctcggagttggatacggcttttactggctggcttttaatgtgctgactttcgaaatcacggaaccggaaacgagagatttttttaacgggtttttaggcattttgtcttcatcggcgggcatgatcggtccaattgtggccggatatgtcatttcaagacttgaaaacaatacgggttatacaatcattttcagcctgtcgctcggcttatttgcccttgccgtggtcatgagcttttttctgaagcggagggagtcgaaaggccggtttatgctgaaaaaagtttttgatgagcgccacacgaatctgaattggcgccggattaccaacgcgcacttttttcaaggcttgagagaagggatttttgtttttttaatcagcgtatttgtattcattgcgacaaacagtgagctggcgctcggaacattcggtctcgtcaattccgcggtttctttttttgcctattattttgcatcaaggctcatcaaaaaaagagcgcggaaaaaggcgattcttatcggcggattgatcttgtacggcgccctgtttctcatcatttttaaaatgagcttcacgacgctccttttgtacggagtgtttattgcgatcggctatccagttcttctcgtgccgtatgtctcgcttacatacgatgtgataggccgggcgcggcttgccagaaaagccagaattgaatacattgtgctcagggagttatttttaaatgcgggccggatcgtttccatcctttgtttccttgtcatcgttacattgttcaaggaaaaagtgggaataccggcggcgctcgtgctgctcggagccgggcatccgctgatttattactttataaaagacatcaaactggacacggaaacttctgatgaaacagtggaagaagaccgacaaaaacgggcggcggaaccgaattttataaaaggagaaagataaaagggttatctgtagaaaaatatcgaaaaaacctttagaatgaaaaatggcacctgaacagaaggtgtcatttctttctgtaaataagaaaaggtgatgtcatgaggagaaataaaaagaaaatagctgtaaacaaagaaaagaaaaaatcactgccgatccggcttaattttttgtttttggctgcgtttcttattttcacttggattatcgtcgagcttggcatcaagcagatcgttcagggtgatgattataaaaacgccgctaataagcaggaggagtctgatgtcagcacggcggttccgagagggaaaatttacgaccggaacctaaatcccatcgtaacgaataaagcattaaatgcgattacatatacacgttcagcctcaaccacccaggcgcagcgtttgaaaatcgcaaaaaaactgtcgggtatgattaaggtaagcaccaaaaaggtgactgagcgggataaaaaagactattggatgttaacgaggcctgatgaagcgaaaaaactgattacggccgaagaaaagcaaaaagctgaagacaaaaaactgtctgacgatgatttatatcagcttcagctgaaacgtatcacagacaaacagctgaatgagctcacttcaaaagatatgcagatccttgcgatcaaaaggcagatggattcaggctactcactgacgcctcaatacatcaaaaatgaaggggtgtcggcaaaagaaatggccgtcgtcagcgaacatttggatgaactgccgggagttgacgtgacgtctgactgggaacggtcttatccttataaaagcctgatccggacattgctcggcagtgtatccagttcgaacgaaggtcttccgtccaacctgctggatcactatctgtcacttggctacagccggaatgacagggtcggaaaaagctatttagaatatcaatatgaaagcctgctgcaggggcaaaaagagaaagtgcagaacttaaccgactcatccggaaatgtcacgggcagcaaagtgatttcaaaaggacaggccggcaaagaccttgttttatccattgatatggacctgcagaaatccgttgaaaaaatcattgagaaaaatttaaaatcggcaaaagcgagaccgagcacgaagcttcttgatcgggccttcgtcgtcatgatgaacccgaaaaacggagaagtgctgacgatggccggcaaacagattacgaatgaccatggaaagtacaaaattaatgattatgccctcggcgcaatgacttcctcctacgcaatgggatcggcggtcaaaggagcgacggtgttgaccggactgcagacgggcgcgattaatttgaacaccgttttccaggatgaacctatgtatttcaagggaagtaaaaacccgaaaaaatcatggacgaatttaggtcccgtagatatccaaaaagcgcttcaggaatcatcaaacgtgttcatgttcaaaacggcgattgccgtcggtaaaggggagtacaaaaaaggccagtccctgccgcttgatatgaaggcattcgatactttcagatactacttcaatcagttcggactcggagttaagacggggattgatcttccgaatgaagcgaccgggtaccaagggtcacagcgaatttccggtcttctgttagactttgccatcggacagtatgatacgtttacaccgctgcaaatggcgcagtatgtatctacaatcgccaatggaggctatcgtttgaagcctcagcttgtaaaagaggtcaggcagcctgattcgaaaaaaggaatcggagccgttgtagagtctgttcagccccaagtgctgaacaagattgatatgaataatgcagacattaaagaagtgcaggcaggtttcagacgcgtcatgacaaaagggacagccgcaactgattttgcgactgcgacttacagtcctgccggtaaaacgggtaccgcgcaatctttctatgacggtcctgacaaatcagagacgggtgaagcaacatataacacgactcttgtcgcgtatgcacctgctgataatccggaagtggctatttctgtagtcgttccttgggcctatattaattacagcgatcgatattcgattacggatgatataggaagagcagctctggacaaatactttgagctgaaaaagaagcaagaagataataatacgaagcagaaaaacgaagataaaattcaggaagacgctgaaaacggcaatacaaacaactaatagaaaaacgctcacaatctgtgagcgttttttttatacaaaaaaacatccggatttacaaaaccttaacacttgatttatacgcattttacaagaaccctttactctagacctgtaggacaaattacacattaaatgcagggggaattcaggaaatgaaaaaaaacaaatggatgcttatgcttctgatggctgctgttatgattgttgctgcagcatgcggaaatgcaaaggaaagcggcaagacagacagtcaatctgcaagtgcggataaaaaagcatcaggttctttaaccatttctggttcatcagccatgcagccgttagtactggcagcggcggaaaagtttatggaaaaacatccggatgctgatgtgcaggtgcaagcgggaggttcaggaacaggtctttcgcaagtgtctgaaggggcagtgcaaatcggcaactcagatgtctttgctgaagaaaaagaaggcattgatgcaaaagccctaaaagaccaccgagtagcggtagtggcgatggcggctgcggtcaaccccggtgcgggcgtaaaggatataaccaaaaaacagctgacagacgtctttacaggaaaaattaaaaactggaaagagcttggcggtaaagatcaaaaaattacactcgtgaaccgtcctgattcatcaggaacacgcgctacgttcgtcaaatacgcgcttgacggagcagatcctgctgagggcattacagaggattcctccaatacagtcaaaaaaatcattgcggaaacgccgggagcaatcggttatctggcattctcttatataaacgatgacaaagtaacgcctttatcgatcggaggcatcaaaccggaagagaaaaacgtcgtcacaggcgagtatccgatttgggcttacgagcactcttatacgaaaggtgaagcgtcaggccttacaaaaacgtttcttgactatatgaacagcgatgaagtacagaaaagtatcgtaaaagatcaaggttacattccgatctctgatatgaaagtcacacgtgacgcaaacggcaagcaaagctgaggggagggcgggctccccgcctcttcttccttataggagtgtaaacaaatgataaatcacagagaaaaagagtctgtaagcgaacgcttaataagctcaaaacaaaacaggcaaatggatgaagtccgcggaagggtgattgtgtctgtgtgtgccgcgattatcattgcggcatcagcggcgatcacaatttttctcggcataaaggggctgcaatctttttttgtaaatggtgtaagcccgattgagttcttaacaagtctgaattggaatccaacccaggcaaaacctgagttcggcgcgctgccttttattttcggatcatttgcggtcacggttctgtccgctctgatcgcagcgcccctcggtattgcgggtgccgtgtttatgacggaaattgcgccgacttggggaaaaaaggtgctgcagccggtaattgagctgcttgtcggcattccgtccgtcgtttatggattcataggtcttacagtattggttccgtttatcggctcttttaaatcaagcggaacgggtcacagccttctggcggggacgatcgtactctcggtaatgattctgccgactgttacatcgatttccgctgatgcgcttgcgtcacttccgaaacaccttcgcgacggttcatatgcgcttggtgcgacgaggtggcagacaatcagaaaggtgcttatcccggcggcgtttccgacattgctgaccgctgtcgtgctcgggatggcaagagcgttcggagaagcactcgccgtacagatggttatcggaaatacaaagcttctgccggaaagcctgcttgatacggcgggaacattaacgacgattattacgttaaacatgggccataccacatacggcagtattgaaaataatacgttatggtctatggggcttgttcttctcatcatgtcgtttctgtttatattgctcatacgctacttgtcgtctaggaggaaagtgtaatgaaccggaaaataacggataaattggccaccggtgtattcgggttatgcgccgctgtaattgcggcgattttggcaggattgtttttgtacattcttattcacggcgtctctgaaatctccttgcattttcttacgtcaaaatcgagcgccattgcgtcaggcggcggaatacgggatcagctttttaattccttttacattctgtttatcaccatgctgatcacgataccgcttggtgtggggggcggcgtctttatggctgaatatgcgccccaaaataaaatcactgattttatcagaacgtgtattgaggttctgtcttcgcttccgtccattgtcatcgggatgttcggcatgctgatgtttgtaaacctgaccggatggggctacacgattatcggaggcgcgctcgcattaacggtctttaaccttcccgttatggtccgggtgacagaaggcgcgctcactgcagttcctaaggagctgaaagaagcttctctcgctttaggcgtatcgagatggcataccgtcaaaacggtgctgattccgagtgcgattccttcgattttaaccggagccattctcgcatcaggaagagtattcggagaagcggccgcattgttatttacagcgggactgacaacgccgcggctgaattttacggatttgaacccgttttctgaatcatctcctttcaacattttcaggccggctgagacgctggcggttcatatatggagtgtcaatacgcagggaatcatccctgacgccgaagcgattgcaaacggcggctccgcggtgctggtgatttcggtgctcttgtttaacctttgtgcaagatggctcggatctgtcatttataaaaagcttacggcaaattaatcggaaagaggcgaaaacatgattgatcacatcatcagggaacaagcggaacagacaaagcgttcgccggagtcttcaattttggaagtgaagcatttatcaatttattacggtgacaaacaagcggttaaagatgtaaacatggatattgaaaaacatgcggtgacggctctgatcggtccgtccggctgcgggaaatcaacatttttgagacagattaacagaatgaacgatgccatcccttttgcaagaagcgagggagagatcctttatgaggggctgaatattttgggggaagcgattaatgtcgtgtctctcagacgggagatcggtatggtgtttcaaaaaccgaatctgttcccgaaatccatttacaataacatcacacatgcgctgaagtatgcgggggaacgcaggaaagccgttttggatgatgcggtcgaggaaagcttaacgaaggcggcgctttgggatgaagttaaagaccggcttcattcatcggctctttcgttatcaggcggccagcagcagcgtctttgtatcgcccgtacgcttgcgatgaaacctgccgtacttcttttagatgaaccggcctcagctctggaccctatttcaaacgccagaatcgagacgcttttgacagaactgaaaaaagattattcgattattatcgttacgcataacatgcagcaggcgctgagggtgtctgaccgaacggctttctttttaaacggggaagtggtggaatacgggcagacagaacaaattttcacgagtcctaaagcgcaaaagacagatgactacattaacggaaagttcggatagggggaaggactgtgagccttgtgaaggaagcggtgcacacacagaatttatttgatattcacggcatgaacgtatggtacggagcccaccaggctttaaaagacattacgatcggttttgaggagcggaaggtaactgcgatcatcggtccgtccggctgcgggaaatccacttttattaaaacattaaacttaatgctgcaaatggccccgaatgtcaaagtgacaggcgacatgatctataacggacgcaatctgctgaaagaaaagacggatgcggcagaattaagaaaacagatcggtatggtgtttcaaaaaggcaatccgtttccgcagtcgatatttgagaatgtcgtgtacggtccgagaattcacggcgaaaaaaataaaaagaaactgcttgaaatcgccgaggaatctttaaaggccgccgcgctctgggatgaagtgaaagatcgccttcaccagcaggcgctttcactgtcaggcggtcagcagcagcggctgtgcatcgcaagggcgctcgccacaaaaccggacgtccttctgatggatgaaccgacgtccgctcttgatcccgtgtccacgcggaaaatagaagagctgattttgacattgaaagaaaagtatacaatcgtcattgtgacgcacaacatgcagcaggctgcgagggtctctgatcaaaccgcgtttttctatatgggcgaactggtagagtggggggatacgggcaaaatattttctcaaccggatcatcaaaaaacacatgattatatcaccggaaaattcggatgaaaaaaacgggcccggccattgaccgggtccgttttatactgcctattaaaaaagcctgccggccatatccatctgaatggacgatgcctgcaagcttttttagcgggttaatgttttgacgatttttttaaagctcatatctgagtcgactttgaaatggccggcgcggatttctttatggtaacctgcgtcaatgacgtaatcattaaagtccttcgctgaaggaataatcccttctttttcaagaatggatgacacatcagcagtgctcattccgtctttaatcgtcagtttgtatgttacttttttctttttggcgtctgtgttttggtcgttgtttaacgatttttctttagaatcaagcagtttttgatagtcatcccggttgacggagactttttgctgatcgtcgaggtagctgtttacttctttctctgtcaatgctgttttttcggttttaacggcggctgcctggtcatggtcagtcaaatagaagacagcagcgagaacggccgtcgctaaaatcatgcctgctgcaaaagcctgaatgccccgttttgtcatacgagcaccttctcattatctttaataatggtattgacgtcctcgacagacacgtgctccgcttttgcgatggcttccgcagacattccgttgttatattttgaaatgatttgtttggcgattttttggttaatgccgctgcttttggctttgcggatcacgaggttggtttccagcaattcttcttcaagcaccgtcattttctttttcaacttgtaaatttcctgcatggcggaaagctgaagcgtttcaagctcctgttccacgtctttcatcggatctctttgagaatatgagaatgcaataagcgctatactgacgataaacaacgcaataatagcaatttccacgtttcatcaccttctattattaatttgcccttcttttttataccataaaacgccgccattctaaaggaaatagagaaaaaaacggaattttgtcgggaaatcttttttattcggggagcaaacggttatttctctatagatttcgtatcagaaagcccttttttgtcctgtttcgtcatattttcccttcatctgacgcaagctcattcagaggatcagaagcataaactgatgttttctgcacttaaacaacatttcatgtaaatcactctagcattccgtccattatagtggtattatgtataagtctgaataagtaaatgatatttagtttggagggaaaataatgcgcgttaatattactttggcttgcactgaatgtggtgagcgtaactatatttctaaaaagaacaaacgcaacaatccggaccgcgttgaatttaaaaaatattgcccacgtgataaaaaatctacgttacaccgtgaaacaaaataagctgtttaaaacagcggaaaaagctggagctttcaataaagttctggcttttttgtctttcagggaggtttgagaaacgtgaaagcacaaatcagaaccgatatcaaagcaaagctttctgacatgacagaaagtgaatgggaggcaaaatgccgcagcatgcgtgaaacgctgttttctttaaaagaatggaaacaggcccgcgtgatcgccgttaccatctcgacacgcctggaaattccgacacagccgattattgaacaggcctggaaagagaaaaaacaagtctgtatcccaaaatgctttccgcagacgggagcgatggagttccgtacattttctgcgtatgatcagctggaaaccgtatatgcgggcctcagtgaaccgatcgagagccagacggaaaaagccgcccaaaaagacattgaccttgtgattgtgcccggcgtggcttttgaccgggaaggcttcagaatcggatacggcggaggatattatgatcggtacctctccggttataaaggccgtaccgtgtcgcttctctttgactgccagctgacagaccgcattccccgcatgccccacgatattccggtcgatatgatcgtgactgaatctgaaaccatcgcttaatcgcataaaaaacttcttgcaccggaataattctcgctgtttgacaaacgataggggcaggagggataagatgaaaaaattgttgatctactcattatgcgccgtatctgttttagccgtttaccaaaaccgctaccgtctgatgaacagcgtgctcagccagccggggatcagacggtcattcattcatttctttttaaaaataccgtttatcagaaacaaattcattcagcaggcattttaaacaaatcccgtttttcagcgggattttttgcataagaaaacctgccggtaaaaaacggcaggttttctcgtattgtcagctttttttcaggaaaccgagcagaattgagatcataggagaaatgtacaggaaaaaggtaaacggcaggtagtcgatgacggaaacccctaatgcgcttgccataaaagcgccgcttactccccagggaatcagcgggttgatcaatgttccgccgtcctcaagcgaccgcgcaaggtgaatccgcttaatgctgagcttgtcatataaaggtttataagattgacccggaattaagatcgacaaatactgctcacctgtcgcaaggtttacgcctatacttgagaagacggtcgccatgacaagacgtcctttcgtatgcacgccttttatcaatccttgaagcagcgccgcgatcaggcccgttttttccatcaggccgccgagcgcaaaggcgatcatgatcagagagactgatcccatcatcgattggagcccgcctctgttgataatgctggccacagcctggtcgccggttttaaacgccgtcccgctttgcagggcggatataaatccttgaatgctgctgtcaggaataaaaacagcagtcagaagccctgcggaaataataccggcggtaagcaccggaatcacggaaacccgtctcacagctaaaatgatcaccaacagaggtgaaagaagcgaccaaggcgtaacgtgcacggcctcttttattccggaaatgaccgcctcaatattttgcgttgaagcggcatttattgaaaccgatgaaccgagaatataaaaaagaacaatcgtgatcagaagtgccggaacggtagtgcccatcatatggcgaatatgcttaaaaatcggaatttcgccgattccggcggcaaaattcgtcgtgtcggacatcggtgacattttatcaccgaaacaagccccgcaaatgactgctcccgccgtccattcgagcggaactcccgccgcgcttgctacccctaacagcgcgacgccgattgtactgacagttgtcagacttgagccgacaagcgtgctgataatcatgcaggaaaataatgcggtcaaaagcagctgactcggctgtataattgacaaagcgtaaacggtgacggtgggaatggcgccgctgtacatccaggcgccgatcagcacaccgatcaaagccagcacgataatcggctgcacaccgtttttcaatccgctgacaattcctttttcaagactgtcccacgagaaaccgagccacaaacctgccagagacagaataatgacgcaaaagaacagcggcatatgcggctctgtatgaaagaaaaacaggcaggaaataatgactgctaacatcaagacaaataaactgatggctgagatgaacgtcagccttttttcttgtttcaaaacaacaccccatcaaactttaatccttttgtgcttttgggcacgaaagtattgtaacagaaaaacgcataaatgagtgtttttttacaattgtgaatatacaatttatgaaaataatacaaggatattttctccaatcgttttttgcttgacgcccggatcagtgatgaaatacgcttatactaagaagaatagaaatggtgaagaagatgaattcattttatgacgtgcagcagctgtttaagtcattcggacatatcgtttatttcggtgacagacaagccgaaattgactttatgaaagatgaattaaaggaaatgtacttgtcaaacgtgattgaaagagaattatggcaaaaagccgccggagttcttcagagagaatcggagcggatcaaaggcagataacacagcaggattttaataagaaaaggagattattatggaagatacatggtttgcggggattgatcttggcggaacaaccatcaagctggcctttatcaacatgtacggtgaaattcagcataaatgggaagttccgaccgataaatcaggaaacacaattacggtcacgatcgccaaagcgcttgaccagaagctggaagaactgaacaagccgaaacggatcgtaaaatggatcggaatgggagcgcctggacccgtggaaatgacgacggggatggtctatgagacgacaaatatggggtggaaaaactatccgctgaaagaccatctcgaggcggaaacgggtattccggccgtcattgaaaacgatgccaatatcgcggcgctcggagaaatgtggaagggtgcaggtgacggggccaaagatgtcattttagtgacgctcggaaccggagtcggcggaggcatcatcgtcaacggagaaatcgttcacggaaaaaacggggccggcggagaaatcggtcatatttgcagtattccggaaggaggagctccgtgcaactgcggaaaatccggctgcatcgaaacgattgcgtccgcaaccggcatcgtccgcatcgcgaaagaaaagcttgcggcggtttccgactcttcgctcttacaagtgcgcgatctgacagcacgtgacgtgttcgatgcggctaaacagcaggataagacagcgcttgaagtcgtcgattatgtcgcaaaacatttaggcctcgtgctcggaaatctggcaagcgccatgaatccgacgaaaatcgtgctcggcggaggcgtgtctaaagcgggtgaaatcctgcggtcaaaagtggaagagactttcaaaatcaccgcattcccgcgttctgcggaagcggcggatatttcgattgcggcacttggaaatgacgccggagtcatcggcggggcgtggattgccaaaaatgaatggctcaaacatcaaaactgctgaagaaagtctgcctgcccatatcgcgggcggctttctttttttatctccccagtcatatagttttaaaaaagggggatgaacatggcgggaattcgtgtcaaacctgaattgaaacagcatatgaaagatattgcaaaggtgctttcaattgatgaaaaactgttgaaagccgctgataaaacggcggaaaacgatgaattattttgtcccggctttgccgtgagcgggcagtcagagggtccgccgcttgagacgctgagcgggctttcgcgatacatccggcactgtgaaaggattctttccgctgatcaatgggtgaaggaagaaaaggtgtacggctccgaatcggtttatgaagaaattgagaaaataacggatgtctttccgtttgtcacgtgccgtaaaatcggcagttccgtattgggaaagccgctttatgagctgaaaataggtgcggatacggctgaaagaaaagtccatgtaaacgcctcatttcatgccaatgaatggatcaccaccacggtcgcgcttaaatggtgtaaagaatattgcgcggcattatgcgaaaataaaaccgttttcgggcactctgcgcttgatatattcagcctgacatcattgtcattcgttccgctcgtaaatcccgacggtgttgatctcgtactttacggatgtgaagatttatcagaaaaaaatgaatttcttaatcgattaaatgaacaccgccgggatttccgcgaatggaaggcaaatataaacggtgtggatttaaataaacatttcccatccaattgggatattgaacagaggcgcaaaccgaaagccccttcataccgtgattttccggggacggcgccgctcactgaaccggaggcgcaggcgatgcaccggctgataacggagcagccgcctgaccggctgatcgctcttcatacgcaaggagaagagatttattggggatacgaagaatgtgaaccggagcaatcatcccggatgattcgggagtttgaagcgataagcggaaaccgctatcaaggcgttaaaaccattgacagccatgcgggttttagggattggtttatacagcagtatggaaaagagggctataccattgagctcgggaagggaaaaaaccctttgccttttcatcagtttgctgatatttatcaagcgacggaaggtattttgtggaggtcgcttgttttttgagacatctgtgaaatttctcatttgtttacataaacaaatatgggacaatagaaaagaatggagggaaggctggtgagatacttggtttgtgttctgctgtccgcattcgttctgtgtttagcggcctgtgaaccatctcatcagcagcaagacacaggcgtttcggcaaaatcggcagaacagaaaatcgttccgctcagtaaaaaggaagcggagaaaacggaaggatggctggataacagaacgatcctgtatacagcacatcatcagctgatgaaatatgatcttttcagcggaaaatccgaacggctctatgaaacaaagggcaatattgtcaatgtaaagatcagccggaaaaaacagctgattctcgtacaggtgacaagcagcggtcagactgagcttgtgcttatgaacaagcaggggaaaagactttatcacaaagcctttaactcttatgaactggagacggcttggaatccgtatgacccgtatcaaatgatgattaccgtttttactgaaacatgggacttcactgcctatacggccgatatgaacaacggcattttaaaaaagagtcccgttcaggctccttttgtccattggacctccactgatgaattccaatatatcaagcaaggaaaaacggaggaagagggtcctttatattcttatgacttgcagacaaaaaaagaaaaaagagtgcttcatcacgtcatctgggccgattcccgcccgggcatgacgattgccgtcagacaaacggatcaatcggacggagacggcgagttccttttccaaaagccggcatccgtgacgcaccgctttcctctccaaaaaaagtatcagagctttgcgccgatggaatatgattacgatcagacacacaagcggttttacatattcaagcctgaaggccgctcttacaatctgatcagctttgacttaggagacgaacgggagcggacggtgctcaaaaacacggaaatggagccgattcagatctctccgaacggggaatacgctttatacggctttacgtatgaccgtctgatttcactgaaaacaggcatgacagaaccaatcataacaaatgaaaaaggagtttgaaccaaatggcaattgcagatgtgacaatcattccgatcggaacaaaaacaccgagcgtcagtgagtatgtagcggatgtgcaaaacattttggagggttacaaagctgccggcaagatcaaatttcagctcacgccgatgaacactttgattgaaggtgagctgagcgacttattcgcagtcattcaggacattcacgaagccccgttccaaaaagggctgcacagagtggcgacaaatatccgcattgatgacagacgtgataaagaaacgacactggagagcaaaatcaaaagtgtcagcaaacatttgcagcaataaaaaataagcctgtatccattggatacaggcttttaatgtgcagtcggatagccgctggttacaacggtcattacggtaaaccagccaaacacgcccagcgtggcggcggctaacaaaaatcccaggatatttctctgtctgacagcccgcaggactcctaatacagctaataatgcgacaaggccgaagattacaacaagtaacatcatgctcctcctttgtcattggaacctgaaaatctttccatttcattttaaccgttttcattttgtttgtcgatagcgttttcccggccgcattcattgaatcttccgcagaaaaccttcataataagggcatatacataaagaggtgatgaaagtgaaatggagacgaatgccggccggtccgattcaggcaaacgcgtattttcttgtcagtgaggatcagtcctgtcttatttttgatccgggcggagaagcggacaaaatcaacaattacataaaagaaaacaatctgaagccgctggccatcttactgacgcacgcccattttgaccatatcggcgcgcttgacgaagtaagagacagatgggatgttcccgtatatcttcacaaaaatgaagaaaagtggctggaggactcttccttaaacggatcgggcatattgcgtggcatcgccgtaacggcacggcccgccgaacggctcatcgaaggcgacggcatattggacatcgggcctttccatttggagacattgtttacgccgggacattcaccgggaagcgtttcttattatgtgaaggacgcggatctggtgatttcaggtgatgtgctctttcagggaggcatcggccgcactgatttacacggcggaagtcaggacgtattgcttgattccattcatcaaaaactgctcacgcttcccggatatacacttgtgttaagcgggcacgggccggaaacggatattcagacagagcaggagcgaaacccgtttatcaatggtttttcactgtaaatgaaaaaagacagaccataatcggtctgtctttttctgtcagtgggttccgccgcccggtgtcataataaaaatagagtaatatgtaaatccggcgaaaaatacggttaagtaagctccgaaaatataaatatacatccgctcagtcagattcaaataagaaagaaatacgaaaaagatcgtctgtccaaaaaacaaaagtgaagcgtctttcatgccccctaaaaaaaacatgactgcaaatatccccgtccaaaatcctaacacccggaacatgcgattcattccttatcccctcccgagagtctatctgaagtttattataatagatcggcactcgaaatgtaaacattttcatgattatatttattgtggaatttatgtctttccctgtgttttatatcttatgccgccctctgaaaaagatccgaaaaatctttttgaaatatgtttaatgaaaaaaagttcagggtacttatgttaacaaagagacggattatccgagggaggaatttttaaaaatgaaagaacttattttttattcatacccgagctgcacatcatgccgaaaaacgaaacattggttaaaagcccacaatgttgactttcaagagcgccatctattcagggagacaccgacaattgatgaattgaagcagatcttatcattaacgactgaaggaattgatgaaatattggcgacgagaagtcaaacatttaaaaatctcaacctgaacattgaagaaatgactgtaaatgaagtgctgaagcttttgactgagaagccgaaactgctgcggcgtccgattctgatcgatcgaaataagctcgttatcggatacaatccaggagaactgatgaagctgacgaagaaaaaaacggtacatcaatctgtatcataagagaaaaacgaagatccgctgatcaaaatttatcagctaatcttcgttttttgcggttgcgggactgggctagctggattcgaaccaacgatcacggagtcaaagtccattgccttaccgcttggctatagcccatcggatgtaattacagtatgtgcgtccggcgccgatttatacatacaaaggaatttgaatggaggagacccgtgaaacatttgagtgaaacattatctcgaaccttaattgaagaatcaggtgaaatcacacgccagtggctgctcataccaaaatcggggcggcctacagatgatcagaaagcggaaatgcagcaccgtctgttaattgaaatcgttgccggcattttatcggaaaaagacggcggggaagaggagctgacaaaatgggcgcttcagttcgcaagggaccgggccgtccatgaagtaccggtctatgaaagcgtcacgagctttaaagaattccggagattggtctggaaccgcatacagacgtgctgtgaaacaatgtctgagaagcctggggcgaatgcggtattccattggggagagaagctgaacaaagcaattgaccatatgattgaagtatttacagaggaatattataaagtgacggttacacaattaaacgcccaaaaagaaatgattaacgaactaagtgcgccgattatgccgattgccgacggtattggaattttgccgctcgtcggcgaaattgacacctaccgggcaaaaatgattttggaatcggtgcttgaccaatgttcttcactccgtctttcttatttatttttagatatatcaggtgtgccgattgtggatacgatggtcgcttatcagatttttaaagtgattgacagcacaaaacttcttggcatagaaacgacaatctcaggcatcaggccggaaatcgcgcagaccgtcgtgaagctcggcatcgatttttctcaggtgaaaacggagcagagtctggcgaaagcgctggcaaaaaacggatttatcgtaaaagaatcattaagatgataaaaagctgaatggccgggagggatgtctccctcagctattcagctttgtcagcttcaatcgtaatgatatgatggctgtcgatttcttttaccgtaaatgtgtagcattcaaaatcaatggtgctcccgggcttcgcgtcaatatcctgagtaagaaaccagcccccgagtgtatcgacttgatcagccgtaatctctgttccgagtacatcattgacgtcactgatcagcaatttggcgttcaggagatagcggttcttcccaagcttttgaacggaaggtgtttcgtccgtatcaaattcgtcgcggatttcgccgacgatctcttcaatgatgtcttccgccgttactaatcccgcggttccgccgtactcatcaatgagaatggccatatgggcgtgttcccgctgcattttaacgaataattgataaatcggaatcgtctcaatcacatggatcgccggctggatgtaagggctgagttcgtgttttgtaaacgccgctccttctgacaggaatctgaataaaacttcttttatattgatgatgccgactacatgatctttatctccttttactacgggataccgggtatatttatttgttttgataatgtcccggagcatatgtcccgatccgctgtctaacggcagactcaccatttcattccggggcaccataatttctttggcagtgcgcttatcaaatgtaaaaatattatttacgtaatgcagctcgctttttttaatcatgccgcttcgatagctttcggccaggagcacccgcaattcctcttccgtataagccatttcatgttcggaagcaggcttcaagccgaacatggctgtaatcaggcgggcggaatgattgagcagccagatgaacggaaacattaacttataaaacaaaatcatcggtctggcagacaaaagtgtaatccgctcggctttttggatagcaaaacttttcggggcgagttcgccgataacgacattcacatatgtaaccagcagaaaggcgatgatcaatgacaggacttgggcaaccgcttcgtgaactccggtctttaaaaataacggctgaagcattgctttgactgtcggttcacccagccagccgatccccaaagcggtgacggtgatgcccaattggcacgccgataaatattcatcgaggtgtgtaatgacatgcttggctgcttttgctccttttacattttcctcaatgagctgattaatgcgggagcgccttgctttaacgattgaaaactctatggcgacaaaacacgccgttaataaaataaatagtacgatggcagatagtttgatgatatacaatgtaacgccttccgcgaaggaaggcttgcacctcccttttttcggaataataccactgtagaaagctgctcaaacatcgagcctggtttagcccgcctcatttacggtaataaaacaagaaagcgatactggaggatgacaagagatgaaggtacattcgggagcggactggctgtggtaccagctcggtccgcatgaaaaaacggaagcgaaaaaaatgatccatcacaatcactggccgcaatgcgaaaagtggtttgaacatgaaaatcatataaactttctgcgctcagatacaaatgatcagaataatgaagcggttttcggttctttaatctatcatcaaggattagatgatgaaaaaaaccataccgtatttcacttttatattacgagagacttcttttttacaattaattttgatttttcgctgctgcgcggtgtaaaagaaaagcatgccacacagcagattcaaacctgtgaaaatccgattgaaggcttttttgttctgctgggagagctgatgaattcctatctgatcggactggatgaatttgaagtcaagcagcggacgctgaaatggcagattcatgatgacaacagcaaaggaatcttggaaaatgtgcataaactgcgccatgagctgttcatttggaaaggccttacactgggggctcaaaaagtggaaatggctttaaaagaagcttttctcccgaaaaatgacaggcagaaagattacctcagagctcatcaaaagatggaaagaggaattacatatatcaatgagtttgatcaggaactgagcaatctgctgcacgccgaggaagtcattacctcccaaagaggaaatgaaattgtgaaagccttgacgatctttacaactctctttacaccgatgacggcgcttggagctctctgggggatgaactttgataacatgccggagcttcattggaaatatgcgtatatttgttccatcgtgctcattattgtatcaaccctgctgatttatatttatctgcggcagaaaggctggacaggggacattttgaaggagcatcaaaaaaaatatttgcggaaagaaaagaaacgctaagaagagcaggcatacgcctgctttttttgatggctgaaaatggccgaatggttccggatttcattcggtaaatcaatgtcagggggcttatttttatttttttacgttttacacactgtaaaacgcataatctctcctttgccggcttttgtgtatctgatttacaatacgtgcggaaggagggaagtcttgtgaaaaatatagaaacatacagcaggaacatcataaacgaggcctatacggcaagggcttcagatatacacattgtgccgagagaaagggatgctttcattcattttcgcatcggccatgctcttgtgaaaaaaagagtcttaaaaaaagaggaatgcgtaaggcttatttctcattttaagtttttatcggccatggatataggagaaagacgtaagccgcaaaacgggtcattgtctctgccgcttccgacggaaaccgttcatttgagaatgtcaaccttgccgacaatgaatgatgaaagtcttgtcatcaggcttttgcctaagcggcagattccccctctggataaattgtccttatttcggggggcgggcgccgcattattgtcctttctgaagcattcgcacggcctgcttctgtttaccggccccaccggatctggaaaaacgaccactctttactcgcttgtcaactatgcaaaaaggcatttcaaccggcgtattgtcacgcttgaagaccccgtagaaacaagagatgaggatgtgttgcaagttcaggtgaatgaaaaagccggagtcacatattccgccggtttaaaagcgattttaagacatgatcccgatatgatcatcttaggggaaatcagggatgccgagacggctgaaatcgcagtccgcgcggccatgacgggacacctcgttctttcaagcctgcatacaagagatgctaagggcgccatatacaggctgctggagttcggcgtgaacatgacagaaattgaacaaaccgtcattgccattgccgctcagcgtctggttgatttaacatgtccgttctgcaaagaggaaaactgttccgtgtactgccggatgtacaggcagacacgccgtgcgggcatttatgaactgctctacgggaaaaacctcacccaatgctttcaggaagcaaagggagagcacgccaattttcaatatcagacgctccgcaggctgatcagaaaaggaatcgcgctcggctatgtcacgaccgacaattacgatcggtgggtgtatcatgaagcggattaaacgaacctggccgttgaaggatcaagcggcttttttgaaaaggctcggtgaaatgacggaaaaaggatacagtctgattgaagggctcagactgctgcaactccagctgcataaacgtcagcttgcagagctgacggacggaatccgccggctgagggaaggtgatgcgttttaccaagtgcttgaggcactgtcttttcataaagaagccgtctctatctgctatttcgcggagaaacacggggaattgccgggggcgatgaaacaaagcggcgaattattacagagaaagctcatgcagacgaatcaaatcaaaaaaatgctccggtatccgatgtttttaatatcttccgtctgtgtcatgttttatattctgcaaagtttaattattccgcagtttgctgggatttatcaatcaatgaatatgaatacatccggtacgactgctttcatctttgcgttttttcggcattttcatgaagcctgcgcactggcgctgtccgccgctttctgcttgtttttgtacgtttggttcttatgtaaaaaaaaatccccgcaagataaaatgctgattgttgtgaaaatacccctcttaggaaaagcggccgttctttttaacagctactttttctctttacagctcagcagtcttctgaaatccggcctttctatctatgacagcttaacagcttttaaagaacaatcttttctgcctttttatcgtgaagaagcagagatgctcattacacgtctgaaagccggagaaaccatagaatccgctctttccgggcatccgtgttatgaaaaagaccttgcggctgcagtcagccacggacaggcaaacggcctgcttcaccgcgaactttatacgtacagccagtttatgatggagcgtcttgaacaaaacgcggcgaagtataccggcattctccagcctgtcatttacggtgttgtggccggtatgattttaattgtctacatgtcaatgctgatgccgatgtaccagatgatgaaccaaatgtaagggagtgcttcgtctgaaaaatcaagatggatttactttaattgaaatgctgatcgttttatttatcgtttccattctgcttttaatcaccattcctaacgttacaaaacataatcaaagcattcagcataaaggctgtgaaggactgcagaatatggtgaaagcccaagtgacggcgtacgaaatcgatcatgaaggtaaaatgccggatatgaacgatttacaatcagaggggtatatcaaaaagaatacagcctgcccgaatggtaaacagatcttaattagtggcggagaagttacagttgaacaataacaggcggacagaaaatgggtttacccttcttgaaagcctgattgtgttaagcctggcgtccgtcctgctgacggttttgttcacgacggttccgccggcctacacccaccttgccgtgcggcaaaaaacagaacagctccaaaaagatattcagcttgctcaggaaacggctatcgcagaacataaaagaacaaaaatcacttttcttccaaaagagcataaatataaactgcagtcaggcggaaggattgtcgagcgttcctttgattcgcttcacattacacttgtgactttaccggagagccttgaatttaacgaaaaaggccatccgaattcgggaggaaagattcaattgaagagcgccgggttcacctatgagatcacagtttacttagggagcggaaatgtccatgctaaacggaaataaggggttctctactattgaaacactatcagcaatggccatttggctgttccttatgacgtctatcattccggtctggacgggcatgctgactgatggtctgaaaatagaagatcgccatgaagcgtaccagcttcttcagaaacatatcagcacttatatgatgaccggaaaaaagccgccgtctcccggtgtgaagtggaaggaggatggtgagtattacaaagtgtgtacggctgaccgcagcgaaaaagaaatgtgcctcagcattctcaaaacagactggctttacgcttcttaatgttttgttctccttggcagtctgtcttttcctatcaggcaccttgggcccgattttacatctgtttttatcaaaccggaccgataacggcggattagacagccgggagcatcaaattgccgttcagcagatcatgaacgaatgtaaacaggctgagactgtgaagccggcggacggcggacgggcgttagcatgccggaaaacaggaggcgaagaagtgcgttttgaaatttatcataagatgataaggaaaagagtaaacggaaaaggccacgtgccgatcctgcaaaacgcggcatcattaacggctgatgtgaaaaacggcctgctcttattagagatctcaagcgttgcaggtaaaaagaatcaggcggtcattccggtttacagcttttttaaaggtgattaaatgtacaaatctgacggttttatatatcccgcggttctgtttgtttctgccgcagttttacttgtcatcagctatacttcatctgatttcatcacccgaaaaacatttgcaaaagaggccggggagtactggaccggagagaacctgctccaaaacggcgcgctgctgtcaagccgccatatgacacagggacaaaaggtccaaactggtacacagcgttttccgtatggcaccgtttcttttcacatcacggggagtgatcgccgggaaacggttcaggttacaattcaggcggaaacaacgacaggaacgagacgggaggctcaccttttgttcgatcagaagaagaaacagctgattcaatggacggaagtataaaaaagaggcggcgggacaacacttcatagtaaagacagcactatgaggtgagagccgtgaaaacaaatgattatgtaaaatatatgactgagcaattcgttaaatatttcgatacgccgaaacaggaacggagagagcgaaaagaagtgcggaaagaaaagaaagtgccggcttctcagcactggttcggaatattgccgtatagttttaagctgtggatgcagcggaaaaaataaagtgaatcacacgaaaggccctcctgatacaggagggccttattggtattcctcaatgacggcaattttatttaccttttggctgtagggattaaaagaaatcgtaacaaacacgccaaattcttttgcgccatcccgcaatgtcaagtggtattgcttgactgcttcgtccgttcttttccgatcccacaccttttgaataaataacgtttgggcgagcggatatctttttttagcttccttttctgctaacttttcccattttgatttatggtgaacagcataataaggcaccgtttccgcctgagctgttcctgaaaccccgaaaacaagaagagaaaggcaaatcagactttgtttgatcatcattcttcgtcctttcgctgtatatactttccattttgttctaggcacctcgttattttctcacgttttattagaaaaaattccaaaaaggtgtgtaatttgaagcaaaacgctgtttttaaaagataccattctcaaaaacgaacaatttgaccgattttgacatttttcaagacgataatccttgattatactttgttcatacagttctttaaagagaacggttgtcatatttattaacagttttacagggggtaaggcatgttccgattgttgcgaatggaaaaaaagggcaaggtgagatggcggatgatgctatttttacggctttcgttcattttttgcctgtccgtgacgatatgtgctcagttcacaggtgatacaagttcctccttcaatgatgtaaaaagcttcagtctccaggttcaaacgtgcggagattttcaatatacggatgacgattgccgttatgacgaacgctgggatcaaagtgatttacatataacaaatcaaactgatacgtcaggcaccgtgtgtgcgccgcttcagctctatgccgagctggagaataagggaaaagagcggactgtttctgactggaaatgggagctccataaaatcgcttctcagcagcagcctttacgaaacggcaatgttgtggaaaaagggcttattactgataaaaaaagcaaaacgatttataaaattaagtcaaagcggtctttgcagccgggcatatacgcattcaaggtttacaagcctgaagggtatccggcggacgaagaaaaatttgagtggtcaaaaccgatgaaactcgtcaaatgccgggaacaggcgaccgtttccgatctaaagaaaacggagaaagagccggctgagccggtaaaagaaagcggggaagaacatgaaaaaaacgctgaaactgatcagtaatattttgtatgccgtcatcttcagcttgattattgtgctgacgttaacggtgatttcgacccgggcttccgggggtgagccggccatcttcggctatacgctgaaatccgtgctgtcgggttcaatggacccggaatttaagacgggttcgctcatagcggtaaagaaaatttctgacgtgaatgacttagaaaaaggggatgtgatcacctttacgcaagatgacggaacagccgtcacacacagaataatcggtatcacaaaaaaggacgggaacctgctgtttgagacaaaaggggaccataatgccgccccggatgccgcacccgttcaagctgaaaaagtggcggcccagtatacgggatatcagcttccgtatgccggatatgtcatccatttggccagccagccgatcggaacggcgattctgttaatcgttcccggcgtcatgcttttgatttactcaataacagtcatcgtcagcgccctccgcgatattgagcggaaaacgaaagcgctggaagaacatgcgaaaaagtgaaccatctctacatgaatacggttgcaacctggcgacaggatttgataacaaaaataaaaagtaaggggagagtacagacatgggtatgaaaaagaaattaagcttgggcgttgcctcagccgcactcggtttagcattagtaggaggaggcacatgggccgcatttaatgatgtgaagtcgacagacgctacatttgcgtcaggaacacttgatttatcggctaaagaacaatcagccaatgtcaatttgtcaaacttaaaaccaggtgataaattgacgaaagattttgaattcagaaacaacggttcacttgccattaaagaagtgctgatggctttgaattttactgactttaaaggagcaaagaaaggaaatgaatctgcggaggatttcctcagtcagtttgaaattacggttctgacagtcggtaaagaagggggcaacggctatcctaaaaatatcattttgaaggcggccagcctgaaagacttatacttaatgtcaacaaaacaggataaagcagctgccgaagcgatcagcaagcacattgatccgaaattcctgagtgagagcggaaaagtcaatgtagcaaccattaacggcaaaacagctcctgagtacgacggagttccgaaaacgcctgctgattatgaccaggtgagaatggaaatccaatttaaaaatgacaccgcaaaaactgcggacggattaagtgtgcaaaacaagttccaaggcaatgcgatttctcttcaattctcttttgaagcaacgcaatggaacggcttgaccattacgaaagatcatacggataaagacggttacgtcaaggaaaatgaaaaggctcacagtgaggataaaaactaatccgaaagtcggacagttaaaagaggagttgtgcacatatggcggcactactcctctttttgcgcttttctccatttttgataatctaaaaattcacgaaattgtttttttgataccccggatgtcatcgcatcgcgaactaatttctcccattcactatctaattgaccatcgtattcggtttcatgtttttcatcaagtaaagtatgaaccgagacgtccagaacagcggagactttttcgagaaattgaatggaggggttcgtctgtaaatttcgttctattgagcttaaataagacttcgctaccccagctttttcagctagttctgatagtgagtagcctttttcttttcggtattgtttaatacgctggccaatcaatgtcatcaccttccttgtgatattatagcacattcagaaaggatttacggtatgacttctggctgcctggatatgttgagaagactttttatgcgaaagcaggtatttgcgtatttcttctaggctgatatttgctttttgggcttctaatatcagctcaacccattccttatctaattgcgaaaattccatttttgcatttttcatgcattttctcctcctaaaatacttgtttatgtatttcagccaatccgcccatgaccttatctttacatgtctggaagtgattcatcgcatgcgaaacgccagaaattttttctatatacttttattataatatagaatttccagaaaaaacgggaaaggtgtcgaatggataacgcttatccagaaaaattactttgcaggaaaaataaaccgccgttttcaatctgaatgtgaattttcggctgatataaggctttcagcgcttgtttttccaaatggtattcctcaggtttttcctctgtctgctcataaaactgatcgagcagcctgaggtcctttttccatctggcgatcgcgctgtcagcccaggctgacggctctttggcggcagcgtcttttaagtaatgctccattcttttaattccgctttccggcttaatcatcggcgatatggtaaagcaatagtctgatatttgcgaggtcagcggaagcggtgcaagcttctgctgaaacccctctataattgttccagaaacaagatgcaggcctaaagacaaaagtctgtcttttttcatgtcggattggtatgaaatcactacatttaatccaagccagggctgaagcggcactctggctccggctgatacaattttctcatatattcttgtaaatctcccattttgtttaactgcttgaaagatttgaaagaggcgcggggctccaaagtaaataaattcgccgtccatatcctccggagccgtttctttatcagtgatgaacgtgatcttcatcgggttcggttcgccgcccgttttttcacgccaatgccaataaaacgggcggttcataatttgtttgtccatctcgaccgtcaactgaaccgtcataaaacccggcccgtgttctgtaatcggacagtggttcgcttcaaaaaagcgcagtaaaaattcgtgaacctcctgctgtctcatgtcgcgcttcctccttttagattaagatcctttttttctggcgggcttttccgtaccgtacgacagaaaagaggtgagattgtccattttgattctcatttcttcctctgtcagcgaatggcataaaatatcatgcaaatggtcttcaaaattgctcactttgatttttgttaaaatgtcatctaattctccgacgacattttcaaataaatgaattttgtcatacagaagttttaaaatatgctcttccaccgtatgttttgtcgccatattgtagatatggacatctctttcctgaccgagtctgtgaatccttccgattctttgttcaagccgcatcgggttccacgggaggtcataattgataatatggttgcagaattgcaggttgatcccttcgcctccggcttctgtagcgatcagcacctgcactttgccgcggaagagatccttcatccagtcttttttcccgcgtttaaatccgcctctgaacggaacggagcttatgccgttctgctgaaggaaccattgcagataaatctgtgtcgccctgtattcagtaaaaataatgactttatcattaatcttttggatcaagtcaacaacttgaattgcttttgagttttgcgtgacttgattgatgcggtccattaaattagcgatcgtctgatcatcgaatgcgggcgcttgtttgtctttttggtcaagcatttttttgagcgtcatatacacggcttccctgcttgaacagcattctctttgcagcgtcataatggaaaatgcgcttgcgggcttttccgtgccgtttttcagtgcggcgatgtcatcgtaaagcgcctgttccgtcggtgaaaaggtgatcggcactgtttccacgtggcgcttcgtccatgtaaggccggtgtcgctccgcgtgttgcggatcatcaccttattgacgagttctttcaaatgctcatgagcgtcaatcccgtccttctgattgaaggtttcttgaaatccgctttcgtttcctaaatggccgggctttaacagtgacactaaattgaagatttcttcgatccggttttgaatcggcgtcgccgtcagaagcaggcagtatttcttcacaagacttctcgcaaattcataatttttcgttttgctgtttttgagcttgtgcgcctcgtcaataatgacgagatcatacggaatagaaaggacaatgtctttgtgaggcgagcgtttggccgtatcaatagaagaaacgacgatatcgcactgttcccacacatagcttttcttctgttcaacagcgggtattaaaaacttctcctgaagctctttcacccactgggaaacgagtgatgccggcacaagaatcaggatttttttggccagcccgcgaatcatatattcttttaaaatcaggcccgcttccaccgtttttccgagccccacttcatcagccaaaatcgccttgccgttcattttttcaacgactttctgcgcgacctcaagctgatggggaagcggagtgaaatcgggcaggtataaaggagccctcaacccttcaaattcaggaatggcaagggtctgctggacttcagccgacagtttgtacatctcccaatttgaccagggaccgtccgttttcagccgctcagaaaactctcccggccagtttgcatcaaatatgatctctgctgtcatatgtaacaaaaccgcctttcttttaaaaaactgatttatcataatttttgttgccggacgtaaatgagggtggtaggatataagtaatgatttcactaaaagatattgctttagtatgtccataaaattggtaaatatgagcgaatgacagcaaggggagagactcggacgaaagatgggcgtccgggcgccgaaggagcaaactgcggagtgaatctctcaggcaaaagaactcttgctcgacgcaactctggagagtgtctgcacttagaagcagcagaccaccaaaggggacgtctttatgatatgttcataaagtaaactttcaggtgccgggacagagaaaccttcattttcatgaggtgtttctctgtccttttttatatgtttttacaatgcgccaatgactgaagggggaagatgatgctgaaacgaacaccgctttatgacgtgtataaagaatacggcggaaaaacgattgattttggaggatgggagctgccggttcaattttcttctattaaagaggagcatgaagccgtccgcacaaaagcgggcctgtttgatgtgtctcatatgggggaagtcgaagtatccggtaaagacgccctgtcttttctgcaaaaaatgatgacaaatgacgttgccgatttaaagccgggaaacgcgctttataccgccatgtgttatcctgacggcggtacggtcgatgacttgctgatctatcagaaaagcgagagctgctatctgctcgtgattaacgcgtctaatattgaaaaagacatcgcctggctgacggaacatgcggaaggcgatgtcacgctgacgaatcagtctgacgggatttcactgcttgctgttcaggggccgaatgctcagtcggttcttacgaagctgactgaatgtgatttgtcctccttaaagccgtttacatttattgatggggcggacgttgccggacgacaagtcctgctttcaagaacaggctataccggtgaagacggatttgagttatattgccgcaatgaagatgcggttcatctatttaaggagatacttgcagcgggagagcatgaaggcctcgttccgtgcggcctcggcgcccgtgatacgctgagatttgaagcgaagcttgctttatacggtcaggaattgacgaaagatattacaccgattgaagccggaatcggatttgccgtgaaacacaagaaagattccgattttttcgggaagtctgtattgcgcgaacaaaaagaaaaaggagccccgcgaaagctggtcggacttgagatgattgaaaaagggattccgagacacgggtacgccgtgaaaaaagacggtgttccgatcggtgaaatcacgacaggcacgcaatctccgactttaaagaaaaatatcggccttgccttaatcaaaacggaattcagtgaagtcggaacggaagtagaagtggaaatccgtaaaaaaacggtaaaagcgaagattgtccgcacaccgttttataaacgtccaaaacagagctgaaaaaggagagtcatatgaagcatcgatatttgcccgcgacagaacaggataaaaaagaaatgctgaaagccatcggcgcagaaacaattgatgaactgtttgccgatattccggaaaatgtacggtttcaaaaagactaccaaattaaaaaagcaaaatcagaaacagagctgacgagagagctgacgaagcttgcggcgaaaaataaagacgctgttacatatgcatcttttctgggtgcaggagtgtacgatcactaccagccggttatcgtcgatcatgtgatatcccgatcagagttttacacggcatatacgccttaccagcctgaaatctcacaaggagagctgcaggcgatttttgaatttcaaacgatgatctgtgaattaacgggaatggatatcgcaaactcctctatgtacgacgggggaacggcgctggcggaagcggcgatgcttgcgtcgggacatacgaaaaagaaaaaaatcgtcatttccgcagccgttcatccggaatcgcgggatgttttgaaaacatacgcaaagggccaatatattgaggttgtagaggtgcccgcgaaaaacggcgtcacagatcttgaagcattggaacatgccgtttgtgatgaaacggccgccgtgatcgtccagtatccgaacttctttggacaaatcgagccgttaaaggacattgagccgctcgcacataaaggaaacagccagctgattgtttcttcaaacccgctcgcgctcggtattttgagaccgcccggggcatacggagctgatatcgtcgtcggggacgcgcagcctttcggcatacctgcggcgttcggcggcccgcactgcggctattttgcagtaacgaaaaaactgatgagaaaggtgccgggccggcttgtcggccaaacggaggatgaaaacgggcgaagaggttttgttctcactcttcaggcgcgcgagcagcatatcagaagagacaaagccacgtctaacatttgttcaaatcaggcgctgaatgctttagcggcttcagccgcgatgacggcgctcggaaaaaacggcgtcaaagacatggcccgccaaaatatattgaaagctgattacgcgagacgccaagcggaaaaagccggcttgcacgtagcatttgacggcccgatatttaatgaatttgccgtcaggctgaatcttcccgtcaaggaagcaaaccggcggctcctgcaagacggcataatcggcggatatgacttaggccttgcgtatccggaactgaatcagcatatgctcattgccgtcacagagctgagaacaaaagaagagatcgattcgcttattgcgggattgggggatcaacatgaataatcaagatcaggcgcttatttttgaaatgtcccgcgaagggcgtatcggttacagccttccggagcttgatgtgccggaaaaagagcttgaaagccttcttcccggtgactatatccgcgatgaagacgcaaagctgccggaagtatccgagctcgatattatgcggcattataccgctctttctaagaggaaccacggagttgattcaggcttttatccgctcggctcctgtacgatgaaatacaatccgaaattaaatgaaaaaattgcccggatcgcaggtttttccgccattcatccgcttcaggacgagggcacggttcagggggcgcttgagcttttatacgatttaagcgggcacttggaggagattacgggcatggacgaggtgacgctgcagcctgcggcgggcgctcacggcgaatggaccggcctgatgatgatccgcgcctaccacgaagcacggggagacttcggacggacgaaggtgattgtccctgattcagcccacggtacgaatccggcatccgccacggtcgccggttttgaaacgattaccgttaagtcaaatgagcacggactggttgacattgaagatttgaaaagagcggtaaacgaagaaacagcggcgctgatgctgacgaatccgaacaccctcgggttatttgaggaaaacattacggaaatggctgaaatcgtccatcaggccggcggaaagctttattatgacggagcgaatttaaatgccgttttaagtaaagcaagaccgggagatatgggatttgacgtcgttcaccttaatctgcataaaacatttaccgggccgcacggcgggggaggaccgggttcaggtccggtcggagtgaaaaaagaattcattccgtatctgccgaaacccgttctcacgaaaaaagaggggcgtttgacttttgactatgaccggccgcagtcgatcgggcgtgtaaaaccttattacggcaacttcggcattaatgtcagagcctacacgtatatccgttccatggggcctgacggcttaaaagctgtgaccgaaaacgcggttttaaatgcaaattatatgatgagaagactcgcgccttattatgatctcccgtatgaccgtcattgcaagcatgaatttgtgttatcgggaagaaggcagaaaaagctcggcgtacgaacgcttgatattgccaaacggcttttagacttcggctatcatccgccgactgtgtattttcccctcaatgttgaagaaagcatcatgatcgaaccgacggaaacggaatcaaaggaaacgctagatgcgtttatagatgccatgattcaaattgcgcgggaagcggaggaatcgcctgaaatcgttcaggaggcgccgcatacaacagttgtcaaaagaatggatgaaaccaaggcggcaagaaagcccgttttaaaatacgaacgtacacttgacggcagccgctgacacggtgtaaaaaaaaagagctgtccgttttatacggaagctcttttttatgattagttttttgctttaatttttccgccccattttttaaatccgcctttcaggttgtaaatatctttacagccgtgtttgcggagcgtctgtgccgcgcgtccgctgcggacattgttttggcagtacagataaacgggtttatcaggacggatttcacttttgcgctgtttcagctgtgacagcggaatgttgcgcgcgccgagaatatggccgccttcaaattcattcggttcacggacgtcaatcagctgcgcttttctgtagcccgcgcggaattcctcttccgtaagtgttttcattaaacgctgctggtaaaaatacgacacgatcatataaacgataaacgcagcaacaataattaaagcaatcatattagacaatgcgattctactcctttaacttataaaatcaaaaccctgcttcctgaaaacaaggcttaccggacgttttgggacaaatactattatagtaaagcatgaagcgattgtcatccttaatgaaacgaaatatttttcattttcaaggcagtttgttaaactgattttattaaaacgataaagaagggttcagtgtatggaaaaagaaacatggcggtttattgactcagggaatgaaagcccggcatttaacatggcgctggatgaagcgcttttatattggcacagccaaaaaaaaattccaccggtgatccgtttttacggctggaatccggcaactttgtctgtcgggtattttcaaaatattaagaaggaaattaactttgatgcagtacataaacacggcctcgggtttgtcagaagaccgacaggcggacggggtgttctgcatgataaagaattgacatacagcgtaatcgtttcagaggatcacccggaaatgccggccacggtgacagaggcgtaccgggtgatttcagaaggtattctgcagggattcagaaaccttggacttgatgcctgctttgcgattccgcgaacggagaaagaaaaagaaagcttgaaaaatccgcgctcgtccgtctgctttgatgcgccttcgtggtatgaactggtcgtcgaaggacggaaagttgccggaagcgcacagacacgccaaaaaggcgtcattcttcagcacggttccatcctgcttgacattgatgaggataagctgtttgatctgtttttatatccgagcgacagagtccgtgaacgcatgcagcggaatttcaaaaacaaagcggtagccatcaacgccttagcgccgaaacgggtaacgatggatgaggccagaatcgcttttaaagccggttttgaggaagggctgaacatacatcttgagccctacacactcacgtctgaagagcttgcatttgtcaatgagctggctgagacgaaatacgcgtccgatgaatggaattataagcgctgataaggcttgacagaccggaagcatccttgttttttcatgaccgttagtgtaaacttgtaatggtttataaagttaaggtgctttttgggagggttacttatgacaacaccaagtatggaagattatattgaacagatttatatgctgatagaagaaaaaggatatgcacgggtttctgatatcgcggaagctttggcagtccacccctcctctgtaacgaaaatggttcaaaaactagataaagacgagtatttgatttatgaaaaatatcgcgggctcgtattgacgtcaaaaggcaaaaagatcggcaaacggctcgtatacagacacgaattgcttgagcagtttttaagaatcattggtgttgatgaagagaagatttacaatgatgttgaaggaatcgaacatcatctgagctggaacagcattgaccgcatcggcgacctcgttcagtattttgaagatgacgaaagccggaaaaaagaattgaaatccgtacagaaaaaaaccgaaaatcccggtgaataaagggcagcccgaaatggggcgccctttttttaatgtcttcattctttggtctatttcgcccagccgtttcttaaaataataatacaccttgagatggaagggagagggcgcgctatgcagattgacggcgtattttcgggcggggggataaaaggggtggcgcttgccggcgcttatgaagcgctggaagaaaagggctttcgctttgaaaggctcgccggaacaagcgccggcgcaattattgccgcatttatcgctgcgggctatacgagcagagaggttcattccatcatagatgaggtggacggaaggcaattgcttgatcagagatactcattcctcccgctgaaaatcctgcggtgggtgtcgatatattggcgcctcggactatacagaggcgatatgctggaaaaatggattgcggataaattaaaagcgaagggcatcatcgcgttcggcgatttgaaaaaaggctcgctccgtctcatcgcttcagatctgacgaacggaacgatgatcgtgcttcctgacgatcttccccgctacggattaaatccggagatgttcccggttgccagagccgtcagaatgagctgcagcattccttatttttttgaaccgataaaactgaagacagaaaaaggcagctcaacggttgttgacggcggcgtgttaagcaatttcccgatttggctgtattcaaaagaacgcaaacggccggtcatcggaatttcgctttcgccaaacgaaaaagagcgcccgaaaaaatcaatccgcaacgcttttgagctgttcggggctttgtttgaaacgatgaaagacgctcatgatgccaggcatatcgcgacaaagtacgaacagaatattatttttattccggtggaacatgtgatggcgacggagttttatctcacaccgcaaaaaaaactagctctcattgagctaggaaaaagcagaacagagcaatttttgaagcaatggagctattaaaaaagcgctctgtttttctttttattctttttgccttctatgacggtaagctgggtctggctttttttcttaagaatcatcggcttcggtctgctgctgctcggcacgctccgcaaatggctgacccggcctctgtgtccggcgcggtgcttcgctttttgctccttcattcggagccgcgattgtctggccgcttttctgaaagcggttccgtcacggccggtgcggcggttcaggaccgtcctcacgataaaataaattatgatgcctgcgataataacggtgatcgctcttgaaatcatctgcccggggttggttaccgccgcataaatgaaaccgaatgcgccaagcgctatcaatacagcaaaaaaaggttgtacacgatgattcataactgcccacctccaaaataataacggtaacggttcagattacgttgtgagacggtttttcgctctgttctgaaatgtcttccagtctgagaagctcgttaaagctttctatggcaacctcgacctggtcatccgccggttcctttgtcgttaaaagctgcagccacaggccgggataaccgagcactttcaaaacggggatattccgcactctgttcgtcagctggagcacttcaaaggagatgccgagaacgaccggtataagcgcaatcctgtctaaaatccgcacccaaagcggatctgtcggaacgagtaaatagatgaacatgccgacaatgatcgtaaataaaataaagcttgaaccgcaacggtaatgaagccgtgactgtttctgaacattttctattgtaattggcaaattctgttcataacagtttatgaccttatgttcggctccatgatattgaaacactcttttaattaacggcgtcattgataaaaaataaatgtagccgagaagcagaataagcttaaacagactttcgattccgatctgcgcggcgtctgaggaaaatacgggccttacaagctccgctaagaagaccgggacgagcgtaaaaacgaatttgctgaacaaaaacgacagaacgccgatcaccgccaggctgaaaaacatcgataagcccgaacctttcttatcttcctgctccagctttgcgtcatcttgaggatcaagcccgtaacgttcgctggaaaagtttaaatgctttgtgccgttggcgctcgcctcaatgatggcgacgattccccgcaaaaaaggaatcttttttaaagccgaaagcttggcgttcggcactctcggaagcttgaaaaaatcaatgcttccgtcattcctgcggatggcggtaacataattttttctgccgccgaacatgaccccttcaacgacagcctgcccgccgtaagcagggggcgttttttgtttggacattgtttatcaacctgcctgtttttttaggatttactaaccatttcctttcactctattgtacaggaaaccgcggtaaacctctagttagacagccggaaaatcaatgctttttctacatgcagtataccccgtttctttagattttactcattgaatgaaaatatggcgcagctttttatgacttttcaattttggggcagtctatgactggaggtgccatgatgacaagcgaaaaacattcagaacaggaagaaaaaaagaagcaggatgatgatcagcagcctgtttcatttaccggcagaatttgcggtatcggatttgccggcggtgtattttggagtttgatcggctatctcgggtatgtctttcatttttcagagatcagccccaacatgattcttcagccgtttatgatcggagaatggaaaaaacaatggctcggcacgatggtcagcatcgttgtcatcggattcatttcaattgccggggcgtttatttatttcgtctgcctgaaacgttttaaaaccatgtggccggggatggtgtacggcgtcattttatggtgtgcggtttttttcttattcaatccgattttcgaagatgtgaaatccgtcactgaattgaaatcagatacaatcgtgacgacgctttgcctttacattctgtacggtttgtttgtcggctactcaatttccttcaactacaatgaacttacgtcagacaagcttgcaagggcgcttggcaacaagtgaataagtgtataatccctgtccggtatggtaaaatgttcacgagaagtgaacattttttatgctgaaaaccgggcggggatgctcccgcgttgtcaggcggcagtcaagaatcggcgaggaggagaaagggaatgaaacttgagaaattgcgaaatcttttcggtcagctggatatagacggaatgttggtgacaagctccgccaatctgcagtatatgacgggatttacgggttcgtcaggccttgcggtcatatcgaaagaacgtgcggcatttatcacggatttccgttacaccgagcaggcgaagacgcaagtgaagggttttgacattatcgagcacggcggaagcttaatccaaacggctgcggatacgattcttgagtacggcattaaaaaactcggcttcgagcaaaacagcatgacgtacggaacatatgcatcctaccaagcggtgctgcaggaagcggagatggttcccgtcgcggattccgttgaaaagttgcgcttgattaagtcaagtgaagagattaagatattagaggaagctgcgaagattgcggatgatgcgtttgaacatattctgacgtttatcaaaccgggcatctcagagatttcagttgcaaacgagcttgaattttatatgagacgtcaaggagcagacggctcttcctttgatatgatcgtcgcctcgggagtcagatccagccttccccacggagtggcaagcggcaaattgattgaaaagggagacttggtcacgctcgatttcggcgcttattataaaggctattgttctgatatcacacgcaccgtcgcggtcggagagccaagtgataaactgaaagagatttatcaggtcgtatacgatgcccaagcgcttggtgtcctgcatattaaacccggcatgacgggaaaagaagcggacgccctgacgagggatcacatcactgcaaaaggctacggacagtatttcggccattcgacaggacacgggttcggaatggaagtccatgaatcaccggggctgtctttcaggtcatcggccgttcttgagccgggcatggcggtaacggttgagccgggcatatacataccggaagttgggggcgcaagaatcgaagatgatatcatcatcactgacgacggcaaccggacaattacgcattcccctaaagaattaattattttgtgatcggaatataggaggacatcaaacatgatttcagttaacgattttcgtacaggactaacgattgaagtagacggcggcatttggcgcgtcgttgacttccagcacgtaaagccgggaaaaggagcggcatttgtccgttctaaattgcgtaacctccgcacgggcgctattcaggagaaaacattccgtgcaggtgaaaaagtcgcgaaagctcaaatcgaaacaaaaacgatgcagtatctttatgccaacggcgatcagcacgtgttcatggatacaagctcatatgaacagcttgaattgaacgaaaaccaaatcgaagaagaattgaaatatcttctggaaaatatgtctgtgcacatcatgatgtatcagtctgaaacgctcggtattgaactgccgaacacagttgaactgaaagttgttgaaacagagccgggaattaaaggcgacacggcgtcaggcggcacaaaacctgccaaaacggaaacaggccttgtcgtaaacgtaccgtttttcgtgaacgaaggcgatacgctggttgtaaatacatcagacggctcttacgtgtcaagagcgtagtcaaagaaattcggagtctgctccttttacggggcaggctttttttgcgttctgcctgaatctttcttctatatgaaaatagtgagactacttccgtcagctagagcatatagtgtaacaaaatgcttgaagttgggggattgcaatgaaatttttgtttggttcaatcaattctactgttttaacgatggccggtttacgagttttgtcctcgctcattgaattatcggccgctattatcatgcttttgacaaacgacatcagaaaggcggttgtggtgaatagtattttggcaatcgtcggcccgctgatctttatcatcacaatgacgatcggcatttatcagattgccggacagctctcatatgcaaaattaatattgatttttgcgggagtggtgctgattttggccggtgtgcataaatagagggccggggtgtcataaagtctgtcccggatcatacattttaaagaagccaatcggtaaaaaaggaggagactctattgaatgagattacagaggttctccctgaattattgagagatgccatctccgctgtgcccgaagaagcgagacgggatacagaagaaatcagaatccgcgtcgacaggccggttgaactgatccaaaaaggacaacctttgtatttgtcatatgtctgtacggccggcgacgcacagctgatcctcagccggctcagcaattacagtatgtacacgctggaagaagagctgaaaaaaggatatatcacaatcagaggaggccaccgtgtggggctggccggaagagtcatcgtcgaaaacggagccgtcaaaggactccgggatattacttcttttaatatccgaatcgcccgggagaagctgggaatcgcagaaccgctcattcctttcttatggaaagaaaactggctgaatacgctgatcatcggtcctccgcaaacggggaaaacgaccttgcttcgtgatttggcccggctttccagcaccggatcaaaacgcattcccgcaaaaaagacaggtatcgtagatgaacgttcggaaattgccggctgcctgcggggcattccccagcacagtttcggccgcagaatcgatgtccttgatgcctgtccgaaggcggaagggctgatgatgatgattcgctctatgagtcctgatgtcataattgtggatgaaatcgggagaatggaagactcacaagcgctgctggaggcgctccatgcgggcgtatccgttatcgtatctgcgcacgggtggaatatgaaagacttggtaaagaggccgtcgctgaaaatgctttgggaggaaaacgtgtttgaccggtatgttgaactgtcaaggcgccgcggtccgggaacgatcagcaggatgtacggaaaggacggggaacctgttccgcatgctgaaagcgtgatgacatgctgaagcttttgggtgccgtgtttattctgacagcgacgacttggaccggatttgagatcgccaaaatgtatatagaaaggccgaggcagatccgtcagctgcgcgcggcgctccaatcgcttgaagcggaaatcatgttcgggcatacaccgctgcataccgcctcgggacaaattgccgcacagctttccaaacctgtatcgttattgtttcaagctttcagcagaaggcttgagcagggaagcgattccgccaaaacggcttgggaacagagcttgaaacataattggtcgtccatggcgatgaaaaaaagcgaatatgatgtgctgaagcaattcggagagacgctcgggctccatgaccgtgtttctcagcagaaacatatcaagcttgcgcttacacatttggaagcggcggaagcggatgccggacgggcgcaggcgaaaaatgaaaaaatggtgaaaagcttaggatttttagccggactgttactcattcttctattgatgtaaacatgaggggagcaaacataaaatgggagtcgacgtaaatgtcatttttcaaatcgccggagtcggtatcgtggttgcgtttctgcacaccatacttgatcaaatgggaaaaaaagaatacgcccagtgggtgacgctgcttggctttatctatattttatttatggtggcgacgattgtcgatgacctgttcaaaaagatcaaagctgtgtttctattccaaggataggggggcttacagattgagattgttcaaattgtaggtttaggcctgatcgccacatttctctccctgatcgtaaaagaacagaaaccgactttcgcgtttatgattgtcgtcttcagcggctgcgtgatctttctttatctcatcgaccagatttacgacattatcagaatgatagaaaaaatagccgtcaatgcaaatgtcaatatggtctatgtggaaaccattttaaaaattatcggcatcgcctacatcgctgaattcggagcgcagcttacaaaggatgcgggccagggagcgattgcttcgaaaatagagctggccggaaaaattttgatactggtaatggccgtgccgatactcaccgtcattattgaaacgattctcggacttattccttcttgattataaataaaatggaaaggggggggcacaaaaaatgaagcgctttcggtgggcgggagcttttttgttcatcctcttattttttcagactgaatgtgtacaagctgccggaacagacggtgcgtcgcaggaaaccgcagttcaccaagaatccgctgatgaagtggcgaaaaagcaggccgaagcgctgaaaacagaaggcatcggaaagttttgggacgacatcatgacagaatacggcggtcttctgcctgaaagccaaaagggaagcatcgtcgactttattaacggagaaaaaacgttctcgccggaggcatggctgaaggctttattttcatacgtgtttcatgaagtgctcgcaaacggaaagcttctgggaactttgattcttctcaccattttttgtgtcattctgcagctcctgcaaaatgcgttccagcagagcaccgtcagcaaagtggcttatgcaatcgtctacatggtgctgattattctcgctttaaacagctttcatgttgccgttaattatgccagtgaagcgatccagacgatgacaagcttcattctcgcgctcatcccgcttttacttgcgcttttggcgtcttccgggggagccgtttccgcagctttttttcaccccgttattttatttctgatgaatacgagcggccttctcattcaaaacatcgtcatgccgcttatcttcctgtcagcgattttaagcatcgtcagcacgatgacggatcaatataaagtcacgcagcttgccaatctgctcagaaatatcgcgatcggcgcgcttgccgtatttctcaccgtgtttctcggcgtcatctccgtacagggggcttcggctgccgtgacggacgggattactctcaggactgcaaaatttataacaggcaattttattcccgtgctcggccggatgtttacggatgcgacggatacggtcatcagcgcctcgctcctattaaaaaacaccgtgggaatcctcggagtcggaattttgatctgcatctccgcgtttccggcgatcaaagtgctctcgctcgcttttatttataagctcgcggccgctattctgcagccgctcggaggcgggcccgtcattacgtgcctcggcgtcatcagcagaagcgtactgtatattttcgcggcgctcgccatcgtctctctcatgtttttcctcagcatcacagtcattattacagcaggcaacctcaccatgatgatgaaataaaggaggcccattggatatgagctttttaacagaatggctgacaagcattattttatttatcttattcgccatcgtcatcgacatgctgctgcccagctccagtatgcaaaaatacgcaaagatggttgtcagtctgctgttaatcattgtcatgctcaacccgatattcaaacttttcaaaacagacccggaaatcatcttcgattatttgacaaaacaagagcaatctcaatccgctgatataaaaaatcaaattaaatcagaaaaaaaagaaatacaagcatcaaaccgcgcatatgttttagaagaaatggctgtccaactaaaaaagaaagcggaggagatgttcagtcatgacgaatacaaaatagacgacatccgccttacagcggaagaacaggttcgttcagaagaagatgtaaaaacgatcagcgtgtatatggccccatcttctgaaaaaaccgtgcaaaccgtcgcaccgatcgacatccgcacagaccgcaaatacgaaccggaaggcgcagccgacaaaaaagaggccgcagacatcaaagaaaaacttgcggatatatgggaaatcggcagtgagaaaattacggtttatatggaaggcggggagaaaaacggccatgaataaaaacggactatggaccatactcaaaaaacagctgatgatcggacaggcgaaagacggagaaaaaccaaaactgacaaaatatcattactttctgttcgtgtttgtgctcggggtatcttttatgctggtgagccagctgttctcttcaccggagaataccgggaaggaccaagcggtgcagaccgtcatgtccggccgaacggaagacaaaagcgggcaaaaaagcgcacccgtttttaaggcatcgaaagacggcagcgcaaaaaccacgatcgatgattacgaaagagactatgaaaaccagctgaaagaaatccttgaaacgattatcggcgtggaggatgtctcaattgtcgtaaacgtagacgcaacatctttgaaagtgtttgagaaaaataaaacgaaaaaagacaccaccactgaagaaaccgataaagaaggcggcaaaagaagcgtaaccgatcaaacctctgaagaacaaattgtcatgattcgaaacggggaccaggaaaccccggtcgtcgtccagacgaaaaagcccgatatccgcggtgtactcgttgtcgctcagggagtggacaacgttcaaataaaaaaaaccatcattgatgccgtcacaagggtgctcgatgttccgagctatcgtgtagcggttgcccctaaaaaaatcaaggaggattcataaatcatgctgaaaaaacaaacggtttggcttttaacaatgctcagtctcgtcgtggtattaagtgtttattatattatgtcgccggaaagcaaaaatgccgtgcagatgaaaagcgaaaaaagcagcggagaagtcgccactgaaaaaacgccggctcctgaaacgaaagataagagcggaagcggcacggaaaaagaagacggcacaaaaggaacgaaagattctaaaggcacaaaagaggataaagaaacatcagccgaagcttcggacaaagacggatcggtcgccacagaaacagctgatgaaaacttatttaccgcataccgcatggagcttgaagacgcgagaagcaaagaaagggaacagttaaacagcattgtttcaagcgatgatgcgaccgcaaaggaaaaaagcgaagcctacgataaaatgacggcgctgagcaatgctgaagggacggaaaaacagctggaaacgctgattaaaacacaaggctacaaagatgcgctcgtggatgctgaaggagacaaaatcaacattaccgtcatgtctgacaaacattcaaacgcaaaagcttccgctatcattgacctggtggaaaaagaaatcaagacgatgaaagacgtcgccgtcacgtttgaaccgacaaaataagagacctgaaccgcccgcacccgctgcgggcttttctgatgtcattttagatcagtgttgaatttacacaagcgctcctgtaagataaacatagtatgtacttttagtagcaacccataaatttctattttttatacataggagtggaaactgatgttaaaaatcaacgaaattcatgaactgataaaaagaatcgatgaatcttccatcgacgaatttgtttacgaaattgaaggcgtaagcctcaaactgaaaaaaaatgaagcgccggcagtgaatgtaacgggacaagcccaagccgttcccgccgcttacgcacctgctccgcaggctgcaaaaccggaagcgagtgaagccgctcctgctcaggaagcgccgaaacaagacgaaaacctgcacaaaattacgtctccgatggtcggaacgttttatgcttcttcatcgccggaagccggcccttacgtaaaccaaggttcaaaagtgagcgaaaatacagttgtttgtatcgtagaagcaatgaaactctttaacgagattgaagccgaagtaaaaggagaaatcgttgaagtgttagttgaaaacggccagctggtcgaatacggacaacctctatttcttgtaaaagctgagtaaggagacctgctattatgattaaaaagctattgatcgccaaccgaggagaaatcgccgtcagaatcatccgggcctgcaaagagctgggcattgaaactgtagccgtttattctgaggcagataaagacgccctgcatgtccaaatggccgatgaggctttttgtatcgggccgaaaacatcaaaagaaagctatttaaatgtaacgaacatcgtcagcgtcgcaaagctgaccggcacggatgcgattcatccgggatacgggtttttagctgaaaacgccgactttgccgagctgtgcgaagaattaaacgtaacgtttgtcggccctacggctgacgccatttcaaaaatgggaacaaaagatatcgcccgcgacacgatgcagctggcgggcgtgccgattgtgcccggttcaaaaggaatcataaaaaatacggaagaagcggtttcgcttgcaggtgaaattgggtatcctgtcattataaaagccactgcgggcggaggcggaaaaggcatccgggtcgcacgcacagaagaagaattgatcaaaggcattgagattacccagcaggaagccgctacggcattcggaaatccgggtgtgtacatcgagaagtacatagaagatttccgccatgttgaaattcaggtgcttgcggataattacggaaacacgatccatctcggagagcgtgactgttctatccaaagacgtctgcaaaaacttcttgaagagtcaccgtcacctgcgcttgattctgaaatcagggagcagatgggtgaagcagcggtaaaagcagcgaaggccgtcggttacacgggagccggcacagtagaattcatctatgactacagagaacagcgctactacttcatggagatgaacacgcgtattcaagtagagcaccctgtcacagaaatggtgacgggaacggatctgatcaaagaacagatcaaagtggcatccggacaggagctttcgctcagacaggaagatgttgaatttaacggctgggcgattgaatgccgcatcaacgctgaaaaccctgcgaaaaacttcatgccttcacccggtaaaattaacatgtacctgccgccgggcggactcggtgtacgcgtggattcagccgcatatcccggctactcgatcccgccgtactatgacagtatgattgctaaagtcatcacatacggaacaacgcgtgatgaggcagtcgcacggatgaaacgcgcgctgagcgaattcgtgattgaaggtattgaaacgacgattccgttccatttgaaactgcttgaacacgaaacatttgtcagcggagagtttaatacaaagtttttagaaacatatgatgtaatgggctcataatttttgcgggaggtgaattgaatggaagacaacagtgtgcttaaaatggatcatgatgaggctcatttaggcaaggttgaaattgctcctgaggtcattgaagtcattgccggcatcgccgcttccgaagttgaaggagttgctgaaatgcgcggcaatttcgccacgggcgtcgtagaacgcttcggcaaaatcaatcacggcaaaggcgtaaaggtcgatttagccgatgacgggattaccatcgacgtctattgcgtcgttcaattcgggatctcgatcccgaaagtggcggcaagcgttcaggagaatatccgccaaaccttattaaacatgacgtctctgaccattaatgaaatcaatattcatatcgtcggcattcaatttgacacgaaagcccaagaagtcgaaatcgacgaagaaatgtaatgagcgtataaaaaccaaggggatgggcagccctttggttttttatacgtttcccgtcatttcaggcatgaagaaagccggcttacaaacggcagccgagtttcttcatgctgtgaaatccgaatgaaattaatgcgttttgtgaaaatattcggcattagggtaaaaaacctaaatttcgacatgcgattgagaaaaaaatatgttatgatctctttaagcttaacgacaagcggataaagcggatctgaaggagaaagaaaatgaaaagaagaacagctagagaaaaagctttgcaggcactttttcagattgatgtcagcgatattgcaccgaacgatgccattgagcacgcgcttgatggtgaaaaaacagatgccttctttgaacagctggtgtacggagtgatcgaacatcaggttcagcttgatgaaatgatttccggccatctcgtcaattggaagcttgaccggattgcaaacgtagaccgcgcgatcctgcgtctggcggtgtatgaaatggtttattctgacgacattcctgctaacgtgtcattaaacgaagcaatcgagctggcaaaacggttcggcgacgataaagctgcaaaattcgtaaacggggttctttctaacattaaaactgatatcgaatcataggaggaaagaaaatgactgcaacaatcatcgacggaaaagaaacggctaaagaaaaacgcgaacaattggcaaaagaagtagaagagctgaaagcacaaggcgtagtgcctggcttggcggtcattttaatcggagacgatcccgcttctgtttcatatgtgacaggcaagaaaaaagccgctgaaacaatgggaatgaaatttaagcttgaccgctttgactcaagcttaaccgaggcggagcttttaacagtgattgatcagtataatcaaaatccggaattccacggcattctcgtccagctgccgctcccggatcatatttctgaaaaagccgtaatcgagcggatctcccctgataaggatgttgacggtttccaccctctcaacgtcgggaaaatgctgcttggcgaagatacatttcttccatgcacgccgcacggaattgtcgagttattgaaaaagacgaacgtagatctttccggcaaagaagttgttgtagtcggacgaagcaatattgtcggtaaaccggtcggccagctgctgctgaacgaaaacgcgaccgtcacatattgccattcccggacgaaaaatatgtctgagcatacgaaaaaagcagatattcttgtggtagcggtcggtaaagcgaacttcatcaaagccgatcaaatcaaagagggcgccattgtcattgatgtcggcgtcaaccgtctcgaaagcggaaaactttgcggagacgttcagtttgatgaagcgaaagaaaaagcatctttcattacgccggtgccgggcggagtaggtccgatgaccatcacaatgcttgcgcataatactgttaaatctgccagacgtacgttatcatagataaccggagacagtcacaaaaagtgtgacaatgagcacgatacccgcttcttaaggctcctttcagccagagcgggttttcttagtttagggcaaaaagcctttatgaaaggagtgcaggatgtgagtgaagcggcatatgtcacggtttccgcgctgaccaaatacattaaacgaaaattcgatgtggaccctcatcttgaagacatttggattaagggtgagctctccaatgttaaaattcatacgagaggccacatctattttacattaaaagatgagcatgcccgcatgcaggccgtcatgtttcagaggcaaagttcgaggcttgcgtttaagccagaagacggaatgaaggtcatcgtaagaggcggcatctccgtctatgaaccgagcggaagctatcagctgtacgcgaaagaaatgcagccggacggtgtgggggcgctctacttagcatatgaagaattaaagaaaaaacttgccggcgaagggttgtttgatgaccggcataagcaggccatccccgcttttccggccacgatcggggtcgtcacgtcaccgacgggagcagccgtcagagacgtcattaccacactcaaaagaagatacccccttgtgaaagtcattgtgcttcccgcgctcgttcaaggtgaaaatgccagcagatcgattgtgaagcgcattgaagaagccaatgcacaaaaaatgtgtgacgtcctgatcgtcggaaggggagggggctcgatcgaagaattgtgggcatttaacgaagaaatcgtggcccgggcgatttttgcttccgccattccgattatatcagccgtcggacatgaaacagattttacaatcagtgatttcgtcgcagatatccgggcggcaacgccgacaggagcggcagaaatcgccgtcccccacacgacggacttaatggaacggacaaaaacggcggaagtccgcctgacaagagcgatgcagcagcatatcagcaagaaaaaagaacgggttcaatcgctccagtcatcctacgcgttccgttttccgaaacgattgtatacccaaaaagaacagcagtttgaccttttgtatcagcagttccaatcacagctcacggggcttacggacaggaaacaaaggcagctggagcggaatacgtacagattaacggcgctccaccctgaaacccagctgaaacaggcgaaaaaacggtacgaggagcgctcaaatcagctcgcccgaagcatgaatgtccagctgaagcagcttcattcgcagtttcagacggttcttggtaaactgaatgcattaagtccgcttcaggtgatggagagaggatacagcctggcctataaagacaaagagctgatcaaaagcgttgatcaagtggaacaaaatgatacgctagaagtaaagatgacagacggcgttctgacgtgtgaagtattgcaaaagagaggcgaacgataatgacagaaaccaaaaaaagtgaagagctgacatttgaagaggcgatgaaaggccttgaaggcattgtggcaaagcttgaagaaggagacgtgccgctggagcaggcgattaattattttcaggaagggatggccctttcaaaaatgtgccatgaaaagcttcagcatgttgaaaagcaaatggactttattttaaaagataacggcgaacttgcacctttcagcgttcaggaggaagacgaaggtgacaaataaactggacgcatttttagcatcgcgcaaacaactgattgaacagcagctttctttgtatacagaacggcttgcgatgccggaaaccctcaaaaaatctatgctgtattctttggaagcgggcggaaagaggctgcgccccctcgtcgtcttagccgttctgaatgcttacggaaaagatgaaaaagacgggattccggtcggatgcgctgtcgaaatgattcatacgtattctttaatccatgatgatctgccttgcatggacgatgatgatctgcgccggggaaagcccacaaaccataaagtcttcggagaagcggcagccgtattggccggagacgggcttctgacagaaagctttaaactgatcacatctcatgtgtctgaggcggtttcagcagaaaaacggctccgtctcgtcgatgagctgatcagcgcggcgggaacggaaggaatggtcggcggacaggctgccgacatggaagcggaacaaaagcggataacgcttgaggagctggaatccatccacgagcggaaaacggccaagctcctcggtttttccgtgacggcgggcgccattttggcagatgcgccggaggatgaagtcgaaaagctccgtctgttcagcagccatatcggcatcggattccaaatcagagacgacatccttgatattgaagggcatgaggagaggatcggcaaaccggtcggctcagacacgtcgaatgaaaagtcaacgtatccgtcgcttttaacgcttgaaggcgcgaaagaaaagcttgcgtatcatataagcgaggcgaaacagatcatcagcggcctttctcttcagaaagaattgctgcatgacctctgtgatttaatcgcggcgagagatcattaaaaacggtcctgatttgaaggggctgccgctcctatggtaaaatgtaagcagtttcgatgaaaatacaaagggagtctttttcttttttcaaaaagacactgtttaatttgcagaaattcatgctgaaagtgagttgatccgctttggatcttttatcaatacaggacccgtcatttcttaaaaagatgtcaattgaacagctggaagagctgagtgaggagatccgcaatttcctcatcacatcgctgtctgcctctggcggccatatcgggccgaaccttggggttgtcgagctgacaattgcgcttcacaaagaatttgacagtccgaaagataaatttttatgggatgtcggacatcagtcctatgttcataaactgttaaccggacgcggcaaggagtttgaaaccttgcgccaatataaagggctttgcggtttcccgaaacgcagcgaaagcgaacatgacgtatgggaaacagggcacagctcaacctcgctctcaggcgcgatgggaatggctgccgcccgtgatattaaaggatcgaaagaatatatcatcccgattatcggagacggcgctttaaccggaggaatggcgcttgaagcgctgaaccatatcggtgatgagaagaaagacatgatcgttatcctgaatgataatgagatgagcattgcgccgaatgtcggggcgattcattctatgctgggacggcttcgcacggccggcaaatatcaatgggtaaaagacgagcttgaatatttatttaagcgcatcccggccgtcggcggaaaattggccgccacagctgaacggataaaagacagtttgaaatatatgcttgtgtcaggcatgttttttgaagagctgggctttacgtatttaggcccggttgacggtcattcctaccacgaactgtttgaaaacctgcaatacgccaaaaaaacgaaaggccctgtcctgttacatgtcattacgaaaaagggcaaaggctataaaccggctgagaccgacacaatcggcacatggcacggaacgggtccttataaaatcaatacgggtgatttcgtcaagccgaaagccgcggcgccttcatggagcggacttgtcagcggcaccgtgcaggagctggcgcgcgaggatgacagaattgtcgcgattacaccggccatgccggtcggctccaaactggaagggtttgcgaaagaattccctgaacgcatgtttgatgtcggaatcgcagaacagcatgcggcgacgatggcggctggaatggcgcttcagggtatgaagccgtttcttgcgatctattcgacctttttgcagcgggcgtacgatcaggtcgtccatgacatctgccgtcaaaacgcgaatgtgtttatcggcattgaccgcgccggtttggtcggcgctgacggggagacgcatcaaggcgtctttgacatcgcctttttgcggcatataccaaacctcgttttaatgatgccgaaggatgaaaatgaaggccgccatatggtcaatacagcccttaattatgaggagggtccgatcgcgatgcgcttcccgcgcgggaacgggctcggcgtaaagatggataaagagctgaaaaccattccgatcggaacatgggaagtgctccgtcccggaaaagacgcggtcattttaacattcggtacgaccattgaaatggcgctggaagcggctgaagaactgcaaaaagaaggcctgtccgtgcgtgtcgtgaatgcgcggtttataaaaccgattgataaacaattgatgaaggccattcttaatgaaggtctgccgattttaacgatagaagaagccgtgcttgaaggcggattcggcagcacgattcttgaatacgctcatgacctcggcatgtatcatacgccgattgacagaatgggcatcccagaccggtttattgaacacggcagcgtaaccgccctgcttgaagaaatcggtctcacgaaggctgaggttatgaaccggatcaaactgctgatgccgccgaagacacataaaggaattggatcatgacagcaaaaaaagaacgattagatgtacttcttgtagaaaaaggccttgcggaaacgcgggaaaaagcgaaacgcgccattatggcgggcatcgtatactcaaatgaaaaccgattggacaaaccgggtgaaaaaatcgcccgggatcttccgttaacggtaaaaggaaaccctcttaaatacgtcagcagaggcggattaaagcttgaaaaagctctggaagtgtttcccgtctcggtaaaaggcaaaacgatgattgacatcggctcgtctacagggggattcacggattgcgccctccaaaacggagccgagcggtcctacgcagtggatgtcggctataatcagcttgcttggaagctcagacaggacgagagggtcgtcgtcatggaacggacgaatttccgctattccgagccttccgatttcacagagggtttgccggaatttgcgacaatcgatgtttctttcatctcactccgcctcattctgccggttttaaaaacgctgcttgtaccggggagcgattgtatcgcactggtgaagccgcaatttgaagccggacgggaatccgtcggaaaaaaaggcattgtcagagatcccggtgttcatactgacgttctccgccgcatgaatcaatttgccgcttctgaaggatatacagtgaaaggactgtccttctcaccgattacagggggagacggcaatattgagtttctgcttcatttggaatggggcggagaagacggaaacggcgctgaactgccggaagaagacattctccgtaccgtccgcgaagcacatgagacattaaaagccaaaaagacagatgtaccggaataatagggggctattattccttttttctgccatcatgtactttttatcaagaagcggttaacataatgacaagaacagcttgaaaacagaggtgcttacatgacaaaaggccaaaggcatataaaaatcagagagcttattacaagccatgagattgaaacgcaggatgacttagttgacatgctgagagaagaaggatataaggtaactcaggcgactgtctccagagacattaaagagctgcatctcgtaaaggtgccgacaaacaacggctcctacaaatacagcctgccggcggatcagcggttcaatccgctgtcaaaactgaagcgttcattaatggatgcgttcgtaaaaattgactcagcaagccatatgatcgtattaaaaacgatgccggggaatgctcaggcaatcggcgctctgatggataatctcgaatgggaagaaatcatgggcacgatttgcggagatgacacgatcttaatcatctgcaggacgcctgaagatacggagggcgttcaaagccgtcttttggagctgctgtagcgtaattatcagataaaaggtggaatgctgtttgttagctgaactatcaataaaaaactttgccattatagaggaactgacgatttcgtttgaacgggggctcaccgtcctgacgggagaaacaggggccggcaagtcaattattatagacgccgtttccctattagtcggcggccgcggctcgtctgaatttgtccgttacggtgaaacaaaggccgagcttgaaggactgtttcttttggacagcggtcatcccgtttttgaagtatgccgtgagcagggaatagacgcatctgacgacatgattgtcatgagaagggacatcaatgccggaggaaaaagcgtctgccgtgtcaacggaaaattagtgacgattgcggctttaagggaaatcggcagacttttattagatattcacggacagcatgataaccagctgttaatggaggacgacaaacacttggagcttttggataaatttgcgggtgctgaggccgaatccgcgcttcaggcttaccatgaaggctatgagcgttatatgaagctgctcaaaaaagtgaagaagctgtcagaaagcgagcaggaaatggcgcatcgattagacctgattcaatttcagcttgaagaaatcgagtcggcgaagcttgaattgaatgaagacgaacttcttcaggaagagcggaagcagatatccaactttgaaaaaatttatgaatcattgcaaaacgcctataatgcgctccgcagcgagcagggggggcttgactgggtcggaatggcctctgcccagcttgaagatatttcggatatcaatgaaccgctgcaaaagctgtctgaaagtgtgtcaagttcctattatctgctggaggatgcaacctttcagatgcgcaatctgttagatgatctggaatatgacccggaacggctgaattttattgaaacccgtttaaatgagatcaaacagctgaagcgcaaatacggagcgacggtagaagacattttggaatacggctccaaaatagaagaggaaatcgatcaaatcgagaaccgcgacagccaccttgaagcgctgaagaaggaattggagtcggtcggcaaagatgtggccgtagaagccgccaatttatcaaaaatcagaaaagcatgggctaagaaactggcggaagcgattcatcaggaattaaaaagtctgtatatgggcaaatcaacgtttgatacggaatttctcgtgaaaaccgatccgtcagccagtgaagcaccggttgttaacgggcagcccgtgcagcttacccaaaaggggattgaccttgtgaagtttttaatttcaacaaacaccggtgagcctttaaaaccgctgtcaaaggtcgcttccggaggcgagctttcaagggtgatgctggcgatgaagagtattttttcttcccagcaggatgtcacctccatcatctttgacgaagtggacaccggtgtaagcgggcgggttgcccaagccatcgcggaaaaaatccataaagtatcgaccggttcacaggtgctctgcattacacacctgccgcaggttgccgctatggcggatacgcaccttctgatcgcaaaagaattcaaagacggccggacgacaacgcatgtcacgccgctttctaaacaggacaaggtagcggaaatcggccgcatgattgcgggcgtcgaagtgaccgatctgacaaaacggcatgcacaagagcttttaaaacaggccggacaggtaaaaacgacaggataagctgctgatacaggcagcttatttttttgttccatttctctaacagtgtatccaatgtttttcttcgtatgccggttataaatcaagcgcaggaaggcaaaagtatagatgtagcagaaaaagaaagtggtgtgggataggagcgaggagagtgaaggaatgaatgcacgataacatgaggaaagcaataggtgtaattctccttgtttctttactaagtgtaggcttttttaagccatttaaagaatatttactgataccgtcagaaatgagcgtctttgaaaaccagacacaggccgttccggttaatgcatcaataagcgctgaaaagggcgaattatcagaagcctttacgctgaaagaagagcacggccatgcaaacataacagggcaaacacaaggccggtcagaagtagtatatgatcttgccggatttcccattaaaaaaacgaaagtgcgtgtccttccagaattgaaggtcattccgggcggacagtccatcggtgtaaaactgcattcagtcggtgttttggtggtcggttttcaccaagtgatgacaaaggatgggaaaaagtctccgggagaacaagcgggaattgaatctggcgacatcattattaaaatgaacggacataaaattgaaaaaatgagcgatatcgccccgtttattcaaaaagcgggcaaaaccggtgaatctttggatttattggtgaaacgcgataagcaaaaaatcaaaacaaagctgattccgacaaaggacgaagccgaggggaaatatcgaatcggcctttatatccgcgattcggcagccggcatcggcaccatgacattttttgaaccgaaaacaaaaaaatacggcgcattgggccacgtcatctctgatatggatacaaaaaaaccgattgttgtagaagacggagaaatcgtccgttcaactgtaacatcgattgaaaaaggaaaaggcggcaatcccggcgaaaaactggcaaggttttcgtcagaacggaaaacgatcggcgatattaaccgcaacagcccgttcggcatcttcgggacactgcatcagccgattaaaaacaacatttccgacaaagcgcttccgattgctttgtcaaatgaagtaaaaaaaggacctgcgcaaatgctgacggttatcgaaaacgataaagtagagaaatttgatattgaaatcgtcagcaccacgccgcaaaaattcccggcgacaaagggaatggtgttgaaagtgacagatccgaaactgctgaaaagaaccggcggaatcgttcaggggatgagcggaagcccgatcatccagaacggaaaggtcgtcggagccgtaacccacgtatttgtcaatgatccgacaagcggctacggcgttcatatcgaatggatgctgtctgaagcgggtgttgatgtttacgggaaagacaaagcaagctgactgccggatgatccggcagtttttttatgtgatgcgttcttcacttctttcctggattcatgtaaaataagacatgaagatttttcgacaaattcacgtttcctgatttgtcaaacttaatttttagtcgaaaaacctagaaaatgctagaaaaacaaagatataccactattattggtaaatatggattttttaaaaggggaagtagtggttttgtcgaatgtaacatgtagcagtcaaatgggttgcgtcctgttaatacattgggggaggaagaaacgtggagaaaattaaagtttgtgttgctgatgataatcgagagcttgtaagcctgttgagtgaatatatagagggacaggatgatatggaagtgatcggcgttgcttataacggacaggaatgtctttctttgtttaaagataagaatccagatgtgctcgttttagacattatcatgccgcatctggacggacttgcggttttggagcgtctgcgggaatcagagctcgagaagcagccgaacgtcatcatgctgacggcattcggtcaggaagacgttacgaaaaaagccgtcgatttaggcgcgtcctatttcatcctgaagccgtttgatatggaaaaccttgtcggccatatccgccaggtaagcggaaatgtcagcagtgtcacacaccgtgcgccgtctgcgcaaagcagcattatccgcagccagcctgagccgaagcggaaaaatctcgatgccagcattacaagcattatccatgagatcggtgtgcctgcccatatcaaaggctatctttatttgcgtgaagccatttccatggtgtataacgatattgaactcctcggcagcatcacaaaagtcctttatcccgacatcgccaaaaaattcaacacgaccgcaagccgtgtagaacgggccatccgccacgccattgaagtcgcatggagcaggggaaatattgattccatttcttcactgttcggatatacggtaagcatgacaaaagcaaagccaaccaattcagagttcatcgcgatggttgctgacaagctgagattggagcataaagcttcgtaacgcaagcttttggctagatgtctttttcgcgccttctcttccgtgcatgaacgcggaagagaaggcgttttgaaattttgctggcgaaaacaatggaaatcacccacgccggtacttgttctatacataaatgcgggatctatgccgtctacacgtataataccggagctgatattttaatgattttgccgtctctgaaataaaagcgggggacgcggcggcttaacacagataagacttcgtagctgatcgtaccgagcatttcggcaatttcatcaacggaaatctcggctcctttttgtttgccgtagatgacgacttcttctccttgtttgccctcattctcacctaaactgaccataatcatatccattgtcactctccccgccaccggcacccgtctgccgcggtgaagaataaacccgcggttggacagggcgcgggagtagccgtcagcatagccgattggaatcgtcgcgatgatttcacccggttcggcgatatatgtggcaccataactgacggtccggggctctgtcaccatggctttcacataagcgatacgcgcctttaaacttagtgcgggtgtgagatccacgaggttcagttcctttatcgaggcggacggatataaaccatataacccaatgcctaaacggatcatgtcggcgctgaattccgggaatgcgatagcggcggctgtattgcacatatgcacggtaggcagcgtaatgtcttgattttttaaaaagcggagaaagctgataaacttttcgtgctgcagcatcgtcagctcagtgtccggttcatccgctgttgaaaaatgtgtaaagatgccatcccatgacagatatgtactcgacttgagcgctttcaccactgctaaaagatcttcttccgtacgcacacccagccggcccattcccgtatccacattgatatgaatggacagccgtttcgaatctgcttctttttccaatatccgattcgcttttttgatccagctgacttgaaacgctgataatgttatgttccaaacggcagattttttcacacagctgagagctgtgaagccgagcacaagaataggtgccgtaattcccgctctccgtaacacaattccctcttcgacacttgcgacagcgagctcgctcgccccgctttccagtgcctgccgcgctacttccacagacccgtggccataagcgttcgcttttacgacggccataattttagacgtattcggaatatggcggcggatcgcccgtacgttcttttttatcgcatcaaggtcaacttcaatccaaacttcccggcaaagttttttcatcacgattccttctttccttaatgagtttcagtactcatgctttcaatctgcattctattcaccttgaactgaaatcattcaaaacaagggaaggtgatcgctgatgtttaaaaatcaaggtttcaggaaatcagtacgcctgctttatttatgctgaaagggctgcatggcagcccttaaattgacttcacaatattctgatctgaaaattgatgttcaaacattttggactggcttacagcattgttttgaatgacaatgccgatatttccccctcctgcaccgaaaacggtttttgatgcagtcagcggactgatggatatggcgccgccaacattgacaactccgtttcctgatacgttgtttatcgtaatcgggcaaccgctcattctattttttctcctttctctcacagtctactaactatatgtacgctgtgatatggaataagattaaacaaaacggcaaaaagaatccggctgctgccagccggaaagggagggaaatacggatgtcataatgttttcgttacattttgatcagagtattgagagcttgaagattgagatgtactggattgattcatttgcaggaccatccctgtatttcccccacctgagccgtagacggtttttgatacggttaaaggacttatcgaaaacgcaccgccgacattgacaaccccgtttccggaaagactgttaatcgtaataggaaaaccagccatcatatacggtctcctttctattaatctatttactatatgtacgctgtgtgttagaaataggagtaaacaaagcggtaaaaacttgtaaatcaaaaaaactgccggacatccggcagtttttttagtctacttttcaaacggcacccagccgcctgtattctgaatcatttcccataacggttcaggaagtcggtatttctcaatttcagatgcttgaatggctttttcgatttcctgttcgcggccttctttgaccagcaccgcccattcggggttaatcaaaatgacacgtcccagagccaccagcggaattccgctttctaatacagcaagcgcttcgtccgcggtatagatggaaccgacggccatcagcggcactttatggccgacgcgttcgtttaataaatccatccgcgtccgtgaagtatccgctccgcggcgggctttggaattgacatccatcagtgaaatatgcagataatccaagttctcttccgcaagcgcgtcagcgagcatggatgtttctttcattgtaagccccggtgtttccggctcttccggtgacaggcggtagccgagaacgaatggattttcagcgtgtgtatcaattgcctgtttgacagcgtcaacgactgcaagcgggaacgcaaggcgcttttcatggcttccgccccagcggtctgtgcgccggtttgttttcggtgaataaaattggtgaatcaggtacccgtttgccccgtgaatttcaacaccgtcaaagccggcttcaatcgctctgcgtgtcgcttcgccgaatgctttcacgatgtgctcaatttcttgttcggtgagagcccgggacgtttgtctcccgtcttcttctgagccgctcggactgacgacgtcgttgtttggcacgagttcaggagggcattccaatcctccgtggtgaatctgcacaacggctttcgctccttgagactggatcgcctgagcgagttttttcaagccgggaatgtgagaatcatcatagatgccgggctggcctggaaacgctttgccgtccggcgttacgtttgcacatgccgtaataaccatgcccatttcttttgaacggggagtaatgtagcttaattcacggtcggaaatcgttccgtcatcatttgatgaatagtgtgtcatcggtgcgactgaaatgcggtttggtatggtgacgccgctttcgaacgtaaaaggttcaaacagcggtttataagtttgcttcatcatttcgccttcttccttaggagtttaactcgtccgtattctagcttatgttttaattgtgtgcaattattttgcttgttcttcttcctgaagttatgaccggctgaaccatctaaacgaatgaaacggttttctccgttccttttcaggatctttatatcctcctgaaatttgatggccgatcgagctgaatatgacagcggcggcgaagaggagaatgatttttttcatatacatatcttctttcttatcttttacaaggttatttataagcatacgcttgtgcgaaaaaaccgtcaatttgtttttatttattcttttttccactttcctgcggcgaatatcgttccgatctgaatcacaacacttaacagagcgcacactgccacaactgtgttgctgtccatagaagacaccctcctttttgttaggttgatgtatcatatgacagctgtctctgttttgacaaaaccgtaatgcggtgtttcatatttttcaacacaaaaagggcgcttttttaagcgcctttacttttttttcagccggttcaaagcgatttgaacggcgatggcgtcatccaggtagccgatcggaaacatgtaatccggaatgacgtcggtcgctaaaatataatacagcagcgcgctcccgagaatcgcgcggtcttcagccggtgttgattcatccatatactgatgatgcatgtttttcaaatgatcaataaaagggccgacgctttcttcattgtccattttcttttgaaactcatcgcaaatcaggcgatggccctgctgggttttggcatattgttcatatctggtcagttcgcgctcaatttgctcccgggaaaaaggctgatcaaacatctcggccatattcagcatatcctgaatcgcgtgcatcgggtcttgcggcgcagcttctttttcatggccgatgtctatgcctgacgcctcaagcaattcctccagcggggtgcggagatgttttgaaaattcctgaagatgctttaaattggccttctgcttgccgtttataatccgggagatggtggccgtatcaatgtttgttaaggcgccgagttttctcatggagagcgagtgcttatcaagcagtgattttaaaaggggccccagtgtcgtatttttattttctgtcaagggtgtcacctcgtttccgccggaatgatgatcattaatcaataatttttgcagaaaaggtaccttttctgtgctgctgaataggatagtgtagattcaacggcacaacatgttgaaaagacatcaaagaatggagagaaacgaacatggcttggttattgattttaggtttggcagtgtcctcgagcattgataatttaggagtggggatgtcatacggcatcagaaaaatcaaaatatcgcatgcgtcaaatatgatgatcgcttttatctgttttgtattcagttatatcggaatttatttcggcaaatggatttcagccgtttcaccgggctttcttcctgtattgctggcggcgtttattttatctgtcatcggtatccgcatcattctgctggctgtgccgagaaaaacagcgcgtgttggcgcgtcaggaaaaaaaggccgttttgccggtctgctgcaaaatccggaggcagcggatgccgacggttcgggagaaatcggtatattggaatccatggttctcggggtggccgtatccgcaaatgcgctgaccaacggattaagcgcggggttgatcgggctttctcccgctgccatttccatcactgcggcggtcggaagctttttgaccatatggatcggctgctcgcttggaaaaaaagccgcgtcattgcgcatcggttcttttcatgtcggacagttcagcacggtgctgagcggagtgattattctcatcattgccgccaatacgctgctcttttaagttgtcccgttcattttatgaaaagctcaaaataaatatgaatgtttctattcgggagagcgcatgacgcggctctctttttttgccgatctgatattttttcaaaatgaacagaaagtcgtccgtttccgttaaattctgcatattcggccttcagacagaacttttttcatagactgattagcttgttttctttctaagttcaggtaaacagcaggtcagatagccttcgttccaaatatggaaaagcgctggaggaatggaggctccctttacaaatcggtcattctgttcaaagataaagccgaatgagaaaacgtgaggtgatctgtgtgaagtctgtcatacttctgatcttcaccgcatggctgttatcaggctgcgagtataccgtggaggctgatgcggcgccgtcatttacacaggaaggaacatttataaaagcggccggaaacgatacgatcgcggtcgaaattgacggagaaaggcaagaggtgaaggtgcctttcgctaagcggtttgaatgtcagtctctgcctgaacatacggcggtgcaaatcacctataaaaaagagagcaacggacaattacggcttgaggaactgaaaaaagaaacagatatgtgaaaacggggaggaaaaaacgtgggtttactgacaaaaagcgctgctgccttcggtgccgctcttcttctgcttgcgccgtctgcttatgcagctgaacctttgcaaggaaaaaccatttatatcgatgccggacatggcggagaagacagcggggccggcggaaatggactgcttgagaaaaacatcaatttagcggtgtcaaacaaggtgatcgccaaattggagacagaaggcgcaaaacctgttgcttcaaggactgacgatacttttttacgtttggacgagcgggtggcgaaagcaagcgccagccaatccgatttattcgtcagcctccatacgaattcagccgtctcaacggcatcgggcacggaaacgtattttaattcgacatatgaaggagcagacagcgaaaggcttgcttccgacatccagcagcagcttgtcacgtctttagggatgaaggacagaggcgtaaaagaagctcctttttatgtcattacatattcaaagatgccgagtgtgctggctgaattaggttttatcacaaatcctcaagatgcggacaagctgaaaagcgataacggacaagagcacgccgcggacgccgttgtaaagggaatcgaaacctattacagcggacagtaattataaaatatgtgtaaatagcgccctccttatgtgcataacgattataatagagaaaaccgatgacaaacacctgaggtgacacatatgacgaatatttttgcccaccggggggcgtcgggcgactgccctgaaaatacgatgcccgcattcaaaaaagcgattgaggacggggctgacggaatcgaacttgatgtacagatgacaaaagacggccggatcgtggtcattcacgatgaaaccctcgaccgcacgacgtctttgaaaggatttgtgaaagatacggcgtatgacaaaatcagaaccgccgatgccgccggaaaatggaaagatgcttttaaaggtgtcagaattccgcttttgtcagatgtgctgcgttttgcggaacgtggtgattttctgataaacattgagctgaaaaacagtgtattccgttacgaaggaatggaagaagaagtgattaaaaaagtcagatattacggactcgaaaagcgcgttattttttcttcatttaatcatgagagtcttgcggtttgccacgccttggcgcctgaaattgaacgggcggtgctgacaatggatgtgctgtaccggcctgaacggtatcttgccgccattcccgcttcgggttatcatccgaagctcggtacgccggcggtgagcgctgaagtgatcaaacatcttgcaaaacaccaagcggcgctccgtccgttcaccgtcaatcgtcctgaggatatgaagcagctgatgaaagcgggagcagacgcaatttttaccgattatccaaagctggctgtttctataaaagaagaatgccgcagctgagaagactgttcagacagtcttctttttttatgggcgggaaaaaggcggtgcactcataactcggtcagccggttcatatattgtaacagggcgttttgtgtaagcgttatcttttatcttattgaaagtgaggcaaaattgtgggaaaaacggttatcgtcagtgcggcaagaacgccgttcggaaaatttggcggcgcattaaaagaggtaaaggcagccgagcttggcggcattgccataaaagaagcaatcaagcgcgccgctatcagtgaaagcgaagcggaaggagcggtgatgggaatggtcgtccaggcgggtgccgggcagattccggcacggcaggccgcaagatatgccgggcttccgtggtccgttccggctgaaaccattaataaggtctgtgcatcagggctcagggccgttaccatctgtgatcaaatgatccgggcgaaagatgcggacgtgctgattgcaggcggaatggaaagcatgagcaacattccgtacgccattccggccggccgctggggtgtgaggatgggggacggggtgtttcaggatttaatggttcatgacgggctgacctgtgcgttcgaccaggtgcatatggctgtccacggaagcactgcggccaaaaagtacggcatttcccgggatgaacaggatcattacgctcttttgagccagaaacgcgcggctgaggcggccgaggcgggcaaattgcgtgaagaaattgtccccgtcacctggaccggcaaaaagggcaaacagcataccgttgaagcggatgaggggctgcgccctgatacgagccttgagcagcttgcagcgctcaagccaatttttacagccgacggaacggttacagccggaaacgctcccggtgtaaatgacggggccggagcatttgtgctgatgtcagaggaaaaagccgcgaagcagcatgtcaggccgctcgcagcgatacttggctttgcgtcagtcggactggaagcgtgcgagctggcaagcgcgccgggagaggccatcagccggctcttgacaaaaaccggactgtccgttgacgatattgatttgtttgaagtaaatgaagcatttgcgtccgtcgtgctcgtgagtgaaaaaatagccgggttcagccgggaaaaagtgaatgtaaacggaggggcaatcgcgttcggccacccgatcggcgcaagcggagcgagaatcatcatgagtttaatatacgaattaaagcgtcgcggaggaggtttaggcatagcggctatatgcagcggagcggctcaaggagatgccgtcctgcttgaggtgtactgatcaaaggagggagcgccggatgaaaatgaaaacaatcatggtcgcaggtgccggtcagatgggagcaggcatcgcgcagacggctgcagaagccgggtttgccgtcatgttatacgattgggagccggaaacggtaacaaaaggtcttcaccgcataaagacaaacctggagaaagagcaggcaaaaggacggaagtcacggcaggagacagatgccgttttcagccgtatttccccggcagaactcacagaagcgggagatgctgattttgtaattgaagccattgcagaaaacaaaaaagcaaaagcggaattgtttgacacactagataaaatctgtccccctcatgccgtattggcaagcaatacgtcttctcttcccattacggagcttgccgcggccacaaaaaggcctgaaaaagtaatcggcatgcattttatgaatccggttcctgtcatggagcttgtcgaagtcatcagaggactcgccacatcggaagaaacggcggaaacagtaaagaagcttgccgtccggatgaataaaacccctgtcgaagtcaatgacttcccgggctttatatctaatcgcatattaatgccgatgattaacgaagccgtttattgcctttacgaaggagcagcttcaaaggaagccattgatgcggtgatgaagctcggcatgcggcatccgatgggtccattaacattagctgacttcatcgggctggatacgtgcctttccattatggaggttctctatgcggggctcggagatccgaaataccgcccatgccctctgctcagaaaatatgtcagcgccggctggctcggcaaaaaaagcgggcgcggtttttatgagtacggcagatgacgtaaagatcatgaggggagacggcagccatgcattttacagaagagcacatcatgatgagaaaaatggtgcgtgattttgcccgcaaggaaatcgcgccggtggttgagctcatggaatcaacagatgaatttccggagcggctgattaaaaaaatgggcgaagcgggattgatgggcattcccgtcccggaaacttacggcggggcgggtgctgatacaacatcttacattttagcgattcatgaaatatcaaaagtcagcgcggccgtcggcgtcattttatccgtccacacatcggtagggacaatcccgattttgcatttcgggacagaagcccaaaaacaaacgtatattccgaagctggcagcgggcgaatatattggggcttttgcgcttactgagcctcaatccggatctgatgcgggcagcctgaaaacaacggccgtgcgaaaaggcggttcatatattctgaacggttcaaaaatctttattacaaacggcggagcggcagatctgtatctgacattcgccataaccgatccgggtaaagggagaaagggaatttcagcgtttatcgttgaaaaaaacacacccggtttttctgtcggaaaaaaagaaaaaaagctcggactgttaggttccaatactgtcgaattgcagtttgaccaagcggaaattccggttgaaaaccggctcggcgaagagggtgaaggcttttcaatcgccatgaaaaaccttgacgtcggacggatcggcatagcggctcaggcgctcgggattatcgaagcggcgctcggctgctcggtggagtacgccaaaacccgcagccagttcggcagacccatcgcttcgaatcaggccgtttcatttaaattatctgacatggcgacgaatgcggaagctgccaaattattggtctatcatgctgctgatctgtatcagcgagggcttccgtgcggaaaagaagcatctatggcgaagcaattcgcgtccgatgcggcgatgaaagcggcggtggaggctgtgcagattcacggcggctacggctatatgaaagagtatcccgcggagcgtttatttcgggatgcgaaagtcacgcaaatctatgaaggaaccaatgagattcaaaggctgattatttctaagtatcttcttcaataaaaagtgcgcaaaggagcgaaaccatggaatcttattctcccggtttagatggcgtcatagcggtggaaacggggatttctttcctggatacacagcagggcagtattttaatcaaaggccacgatctgattgagctttctaaaacggccggctatatggacattgttcatctcttattggaagacagacttcctgatgcgaaagagaaggcggcgcttgaagaagacgttcggcgcggcgggcaccttcccgaggaaatcttgcacatatgccgtctgctgcctgaacatactcacccgatggacggactgaggacgggtttgtccgcgcttggaggctttgacaaggacatcgatgaccgttcatcttccgtaaatcagcaccgcgtacgcggactgataggcaaaatgccgaatctgacggtcaacagctatcgagtcatcaacgggctggagcctttggcgccggtcggaaccttatcatacagcgcaaactttttatatatgattaccggaaaaacaccgtcatctttggaagaagaaatcttcgacaggtcgcttcttttatacagtgagcatgaattgccgaactcaacgtttacggcccgtgtcatcgcttcgacgcaatcggatatttacggcgcgctgaccggagccgtcgcctcgcttaaaggaaaccttcacggcggcgcgaacgaagcggttatgtacatgcttgaagaagcgaaggatacagacgggtttacacaattattaactcaaaaactcgcaaataaagaaaaaatcatgggcttcggccaccgtgtctacatgaaaaaaatggacccgagggcgctcatgatgaaagaagcgttaaaaaagctgtctgatctttcaggtgatttccgtctttatcatatgtgtgaagccggcgaaaccgtcatgcgggagaaaaaaggcctttatccgaatttagattactacgcagcgccggtctattacatgctcggcatcccaataccgctgtacacgcctatattcttcagcgcacggacggtcggactgtgcgcccacgtcattgaacagcacagccgaaaccggcttttccgcccgcgtgtccgctataccggagcgcgcctgtaaacagatgagaaaggaagatgaaaacatgacagaaccccgccgaatggacgctgtaatcgaagagatttctgactacgtgctccatcaggagattgacagttcagaagcttttactacggcaggacatgtgcttcttgatacgataggctgcggaattttggcgctcagctatcccgaatgtacaaagctgctcggcccgattgtcccgggaacctccgtgcccaacggcagcagagtcccgggcacgccttttgttttagacccggtcacggctgcttttaatatcggctgtatcaacaggtggctcgattataatgatacgtggcttgcggcggaatggggtcatccgtctgacaatctcggaggcatattggcttgtgcggattatatatccagagtgcggatttcagaagggaaagaaccgcttaccgtgcgcgatgtgctttgcgcaatgatcaaagcgcacgaaattcaaggaattctcgctttggaaaacagcttaaacagagtggggcttgatcatgtgctgtttgtgaaagtggcgactgcggctgtttgcgcacaaatgctgggcggctcaagagaggaaatcaataacgccgtatctcacgcttggattgataattcaagcctcagaacgtatcgtcatgcgccgaacaccggatcacgcaaatcatgggcggccggcgacgcgacgagcagaggcgtatatttggcccttatggcgcaaaaaggtgaaatggggtacccgacggctctgaccgcatctgggtggggatttcaagacgtattgtttaaccggcaggaaatgaagcttgcccgcccgcttgggtcctatgtgatggagaatgttttgtttaaagtatcctacccggctgaattccacgcccagacagcggcggaatgcgcggtccggcttcatccggaggtgaaagaccgcatcgaagacattgataggatcacgattatgacccatgagtcggcaatccggattatcgataaaaaagggccgcttcacaatccggctgaccgggatcactgcctccagtacattacggcaatcgggctgcttttcggagatatcacggcggatcattatgaagaggaaacggcgtctgacccgcgaattgatacattgcggagtaaaatggaggtgacggaacacaaagcgtactcaaaagattacttagacccgaataagcgatccatatcaaatgccgtacaggtgcattttacagacggcacggctacgggacggattgaatgtgaatacccgctcgggcaccggttccgcagaaaagaagccgttccgaagattcttgccaagttttcagcaaacatcagcactcatttttcattgaagcagcagcgtaaaatcgaagaggcctgcgaacactgcggccgaatgcagaagctcagcgtcagtgaatttatggacttatttctcgtataaaataggagggtgacaaacatgacgtggatcgtcagcaagcagtcgtctcaagaggagcttgcagagcggttccgtacgctgatggcagcgccggatctattgcagatccccggcgctcacgatgcgatggccgctcttatcgccaagaaaacggggttttcggctctttatttatcaggcgcggcttacacggcgagcagagggctgcccgatttagggatcatcacgtcggcggaaatggctgaacgggttaaagatttggtccgctcgtctgatctgcccgtccttgtcgatattgacacgggtttcggaggagtgctgaatgccgcccggacggcgaaagaaatgtatgaagcgcgcgcggccgccgtccagatggaggatcagcgcctgccgaaaaaatgcggacatctgaatgggaagcagctcgtgccgattgaagaaatggcgcaaaaaatccaagcggtcaagcgggccgcgccgactcttcttgttgttgcgagaacagacgccaggcagcaggaaggattggagggggcattaaaaagggcgtccgcttatataaaagcgggtgctgacgctgtttttccggaagcgctccaatccgaaagtgaattcagagcgttttccaaacaaatcagtgtgccgattctcgcaaacatgactgaattcggaaaaacgccgtattacagtgctgatgaattttccgatatgggctgtcagatggtcatttacccggtcacgtcactcagaacggcggccaaggcttttgagcgcattttccgccttctgaaagaagaaggctcgcaaaaagaggggctttctgatatgcagacgagaaaagaactatatgaaacgatcgcttacgatgactatgaagaactggatcaatccattgccaaaacaatactgccggacgactgaaaaagccctttttttgcaagggctttttttacagcttttttttcctgaaccgcgggctgacttgattgcgtttccgatctctgtacagaataaatccggccagaacataaaggccgaacaaaaaaaacgccaatccggccgccccctgaagaaaaagggacggaaacggggaaaacgcatgcccgaataatgcatctctcatcagcttaatgccgagcgccgcgacagcgccggggaggaccagaattaaaagcgcaacaagccggctcatattcagaaaacccctttacgatatgttttcctttattgtccaatcgaaaaaatattttgtcaagagatcaaaacgtggtaacataggggttgtgcaaattattgcaacgggaaatacaggtgtgcaaattttttcatataaaggggtatcgggatgcagaaggtgctgattataggtgctggtaaaggaggcacggcgctcctacagattttgatgaaaacaaagctgatccggattattgcggtggttgatcaagatccggaggcgcaagggctgcaagaagcccggaaatatggaattgcaacctcatcagattggaaaccctacataactgaagatatagatattatcatccatacaacaggcgataaagcggtcatggatgagctgctccatgagaaaaaagaacaaaccatcgtcatgccgggaaaattggcgtacatggtgtttcagctgatggaggaaaaacagcagcttatccaaatgctgaagtcgcagacgtataagcatgaccggatttttaattcaacgcacgacggcatgatttttatagacgtcaacgaaacgatcattttatttaatcagatggctgaaaaaatggtcggccaaaaacgggaggatgtcatcggccgccaaattaaagatgtagtgccgaacacaaagctgccgcggattctggaaacgagagagccggaatataaccagaagcagcttctcggaaagcacctgcagattgtcacgacaagactgccgatcattgatgaaggcggaaaacttctcggcgcgttatgcgtgtttaaagatatcaccgacgcagttgaactggcggaagaggtcacgaacttaaaacaaatccgcaccatgcttgaagcgattatacaatcatcagacgaggccatttctgtcgttgatgaaaacggcatcggaatgttaatcaacaaagcgtatacaaaaatgaccgggctgtcagaaagcgaagtcatcggaaaacccgcttccaccgatatctcagaaggggagagcatgcacctgaaagtattggggacaaggcggcccgtgcggggtgtgagaatgaaggtcggccccaataaaaaggatgttatcgtaaatgttgcccccgttattgtggacggtattttaaaaggcagcgtcggcgtcatccacgacgtgtcagaaattaaaacgctgactgctgagctgaatcgggcgcgccagatcatccgcacgcttgaagcgaaatacacgtttgacgacattatcggcacgagtgaacaaatgctggtcgcccttgaacaggcgaagctcggggcgaaaacgccggcgacgattctgctgcggggagaatccggcacaggaaaagaacttttcgcccacgccatccataatgaaagcgaccgaaaatacaataagttcattcgggtcaattgtgcggccctgtctgaatcactgctagaatccgagcttttcggctatgaggaaggcgcgtttacgggcgcgaggcgcgggggcaaaaaaggactttttgaggaagcgaataacggcagcattttcttagatgaaatcggagagctgacccaaagcacccaggcaaagctgctcagagttctgcaggaaaaagaaattatcagagtcggcggcgctaaagcgatttctgtcaatgtcagaattatcgcagcgacaaacgtcaacatcgaaaaggccatggcggaaggcgcgttccgtgaagacctgtattaccggattaaccgctatccgatctcaatcccgccgcttcggcagcgcaaagaagatattgaagcgctgagcattcggctcattgaaaaaatcaatcaggattacggccgcaatgtaaaggggctcacgccgaacgcgctgcgagctttatcagcctacagctggccgggaaacgtccgggagcttgaaaatgttctcggacgggcaatgatatttttagagccgcacatggaacggatcgaacagcagcatctgcctgtttttgaatcagagctgaatgaaaaaaacggcacccaaagtgattttccggatgtggaaggggaaaagctgtctcaggctgttgaaaaatttgaagcgcacgtcattcaaaaaacgcttgaaaagcataaattcaaccgaaccaaaacggcaaaagcgcttggtgtcagcattcggaatctgtactacaaaatggataagtacggccttgcaaatgacggcatgcaataaattgcagagaaagcgcaaacagctgcatgttttcttgaagaaagccggaataaaccctcccgcatatttggcacggaacttgcattgttaaaagcggattcgcacaaggaaggtggtacaaaatgaagctgagagacctagttgaaaaagccgcggcaaaaaacgcaaaaaccattgcagtggcccacgcagcagataaagaagtgatccaggccgtcaaaatggcggcagaacacttgtcggcacgatttttactgacgggtgacagcggaaagctgaaagagcttctcgcaaatgagccgaagttcaatgctgaaatcatccacgccgattcacccgaagaatctgcggcaaaagcagtgcgcgcagtgcgtgaacaagaggcggacgttttaatgaaagggaatctcccgagctcaactcttctgaaatcggttttaaaccgccatgaagggcttcgttcaaaaagggtgttatcacatgtagctgtttttgaggtgccggactatgaccggctgatgtatgtgactgattcagcgctgaacattgccccgtctcttgaagagctcgggcatattctgcaaaatgcggttcatgtcgcacattcagtagggaatcctatgccgaaagccgcagtccttgccgctattgaaacggttaatccgaaaatggaggtgacgctgaacgcggctgcgatcgtccagatgtgcaatagaggacagattaccggctgcattacggacggaccgcttgctttggataatgccgtatccaaagcggctgcgctgcaaaaagggatttccggaagcgtagcgggccaggcggatattctcttggttccttcaatcgaggccggaaatatgctttataagtcaatgatttattttgcgaaagcaagtgttgctgccgtcatcgccggtgcaaaagcgccgatcgcattaacgagcagagcggataccgcagaaaataaactgtattcaattgcgcttgcgatttgcgcatcacaagaacagtaggaggaacgaacctatggaaatttttaaatatatggagacttatgattacgaacaattggtattctgccaagatgaacaatccggattaaaagcgatcatcgcgattcatgatacgacgctcggccccgcactcggcggaacaagaatgtggacatatgacagtgaagaagcggcgattgaagatgcactaagactcgcaaaaggcatgacttataaaaatgcggctgccggtttaaacttaggcggcgggaaaaccgttattatcggagacccgcgcaaagataaaaatgaagaaatgttccgcgcgttcgggcgctacatccaaggcttaaacggaaggtatattacggcggaagacgtcggcaccaccgttgaagatatggacatcattcatgatgaaacagactatgtaaccggaatttctccggcattcggttcatcaggaaatccgtccccggttacggcgtacggcgtctacaaagggatgaaagccgcagcgaaagcggcgtttggcactgattcactggaaggtaaaacaattgccgtgcaaggcgtgggaaatgtggcttacaatctatgccgccaccttcacgaagaaggcgcttctttaatcgtaacggatatcaataaagaatctgttaaacgtgccgttgaggatttcggcgcccgcgcagttgatcccggcgacatttactcacaggcgtgcgatatttatgccccatgtgctctcggcgccgtcattaacgatgacacgattaaacagctgaaggcgaaagtcattgcgggagcggccaataaccagctgaaagaaacacgtcacggcgataccattcatgaaatgggaatcgtgtacgctccggattatgtcatcaatgcaggcggcgtcatcaatgtggccgatgagctttacggctacaatgctgagcgggctttgaaaaaagttgaaggcatctatgcaaacattgagcgggtgctcgatatttccgcgcgtgacggcattccgacatacttagcggccgaccgtctggctgaggaacgaattgagcgcatgcgccgttcaagaagccagtttctgcaaaacggccaaagtatattaagcagacgataggaatttgatctggaggtatgaaaatgttcgaaaaggaaaaacgcattctcattctgaatccaggctcaacatcaacgaaaatcggtgtctttcacaatgaacgctgtatctttgaaaagacgctgcggcatcccgaagaagagctgaaaacatttaacagcatcatcgaccaatacgaatttcgaaaaataagcattcttgagtctttgcacgaacagggcatcaacatttcaaagttcgatgccgtttgtgccagaggcggcctgctcagaccgattgagggcggcacatatgaagtgaatgacgccatgatcactgatttgaaaaacggctacaacggccagcatgcttctaatctgggcggaattattgccagggaaatagctgacggattaaatatccccgcgtatatcgtcgatccggttgtggtggatgagatgactccgctcgctaaagtatcaggaatgcctgaaatcaagcggaaaagcattttccatgctttgaatcaaaaagctgttgcccgtcaggcggcggcgtccctcggcaaacggtatgaacagatgaagatgatcgtcactcatatgggcggcggcaccacagtcggtgtccatgattgcggacgggtgacggatgtcaacaacgggcttcacggagaaggacccttcagcccggagcgcgcgggaactgttccggcgggtgatttggtagaaatgtgtttttccggcaagtattcaaaagccgatatgatgaaaaaacttgtcggcacgggcggactctccggctacctggggacaacggacgcggtgaaggtggaaaaacgcattcaggccggagatgaaaacgcgcgtctcatttatgacgccatggcttatcaagtagcaaaagaaatcggggcggcaagcgccgttttaaaaggaaaagtagacattatcgtcctgacgggcggattggcgtacgggaaaagtttcgtatccgccatcagatcgtacatagattggatttcggatgtactggtgtacccgggagaaaatgaactgcaatctctcgcgcaaggcgcgcttcgggttttagccggtgaggagcagtcaaagcaatatcagatcggcgaaggagtgaaaacaaatggcgactgagtatgatgtggtcattctgggcggcggcacgggcggttatgtagccgccatcagagcggcccagctcggcttaaaaacggccgttgtagaaaaagaaaagctcggcggaacatgtctgcataaaggatgtatcccgagtaaagcgctgttaagaagcgcggaagtgtaccgaaccgcaaaggaagcggcagcattcggcattgaaacggaaggtgtctccctccgctttgacagcgtgcaaaaacgaaagcagggaatcgttgaccggctggccggcggtgtcgcccacttgatgaaaaaggggaagattgatgtattcaacgggtacggacgtatgctcggcccttccatcttctcacctctgcccggtacggtttccgtcgaatacgcaaatggtgaagaaaacgacatgctgataccgaaacaattgattatcgcaaccggttcaaggccgaaaatgctgccgggtttagaagcagacggtacatatattctgacatcagatgaagcgttagagcttgaacgtctgccccaatccatgatgatcgtcggcggcggtgtcatcggaattgaatgggcatccatgctgaacgatttcggcgtcaatatcactgtgattgaatatgcggaccgcattttgccgacggaagaccgtgatatttcaagcgagatggaaaaactgttaacgaaaagaggaattaaggtcgtgacgggtgcgaaagtgcttccggatacattggaaaaagcggacggcgtttcaattgccgctgaaaagaatggaaaaaaagaaacgtatcacgcggaacaaatgcttgtttccatcggccgccagccgaacattgaagggatcgggcttgaaaacacggatattgaagcggaaaacggttctatcatcgtgaacgaagccgggcagacgaaggaatcgcacatttatgcgatcggtgatgttgtcggcgggctgcagcttgcgcatgtggcctcccgtgagggcatcattgccgttgagcatatggcgggtcttaatccggctccgcttgatgccgctcttgtgccgaaatgtatttattcaaatccggaagcggcgagcgtcggtctgacagaagaggaagctcttcgaaaagggcatgaactgaagatcgggaagtttccgttcatggcgatcggaaaggctcttgtatacggagaaagcgacggctttgtcaaaatcgtcgccgatcggaatacagatgatattctcggtgttcatatgatcggcccgcacgtcaccgatatgatctctgaagcggggcttgccaaggtgctcgacgcgacgccttgggaaatcggccagtccatacatccgcatccgtcgctttcagaggcgattggagaagctgcgttagccgcagacggaaacgcgattcatttttaaaaggaaagaaggaggggtttgaatgactacaaaccgccatcaagcattagggctctctgacgaagaagccgttgaaatgtatagaaccatgctgttagccagaaaaatcgacgaaagaatgtggctcttaaaccgctcgggcaaaattccgttcgttgtttcatgtcaaggacaggaagcggcgcaagtaggcgcggcctatgccttaaaccgtgataccgactatgtgcttccgtactacagagatataggggttgtgcttgcattcggtatgactgcaaaggatttgatgatgtcgggttttgcgaaagcagctgacccgaactcaggcggaaggcagatgccgggccacttcgggcaaaaggaaaacagaatcgtaacgggctcatcccctgttacgacgcaggttcctcacgcagtcggaatcgcgcttgcgggacgcatggataaaaaggatatcgtctctttcgttacctttggagaaggatcttccaaccagggggattttcacgaaggggcaaactttgccgccgtgtataaactgccggtcattttcatgtgtgaaaacaataagtatgccatttctgtcccgtatgacagacaggtggcgtgcgagaaaatatccgaccgggcggcaggctacggcatgccgggagtcactgttgacggaaacgacctgctggaagtttaccgggccgtaaaagaagcgcgcgaacgggcgtctaaaggcgaaggccctacattaatagaaacggtttcctaccgtttgacgccgcattccagtgatgacgacgacagcagctacagagaacgcgaagaagtagaagaagcaaagaaacaagatccgcttcttttatacaaagcatacttgcaagaagccgggcttctaggtgaagaagaagaaaagaccatgctggatgacatcatggctatcgtaaacgaagcgacagacgaagcggagaaagcgccatacgcatctcctgaatcaacgcttgatcacgtttatgcgaagtagggaggaatacttatgtctgtaatgtcttatattgacagtattaatgcagcaatgaaagaagaaatggaaagagatccgcgcgtgtttgttctcggggaagacgtcgggagaaaaggcggcgtgtttaaagccacggcgggtctctatgaacagttcggagaagagcgggtgatggatacgccgcttgctgaatcagcgattgccggtgtcggcatcggcgccgcgatgtacggcatgcgcccgattgccgagatgcagtttgccgatttcattctgcctgcggtcaaccaaatcatttcagaagcggcaaaaatacgctaccgttcaaacaatgattggagctgtccgatggtcatcagagcgccttacggcggcggcgtgcacggcgcgttgtatcattcccaatctgtggaggctatttttgccaaccagccgggccttaaaattgtcatgccttcaactccttatgacgcaaaagggttgttgaaagctgcagtccgtgacgaagatccggtgctgtttttcgaacataagagggcgtaccgtctgattaaaggcgaagtccctgcggatgattacgtccttccgatcggaaaggcggatgtaaaacgcgaaggcagcgacattactgttattacgtacggattatgcgtccattttgctctgcaggctgccgagcgccttgaaaaagacggaatttccgcacacgtattagatttgcgtacggtttatccgttagataaagaagccatcattgaagccgcgtctaaaacgggaaaagtattgctgatcacagaagatacgaaagaaggcggtattatgagcgaggtcgccgccattatttctgaaaactgcttatttgatttagacgcgccgatcaagcggcttgcaggtcctgacgttccggcaatgccttatgcgccgacaatggaaaaatacttcatgatgaatcctgacaaagcagaagccgcgatgagagaattagcggagttttaaagacgtaaggaggtttttgacatggcgattgaacaaatggctatgcctcagctcggagagagcgtgacggaagggacgatcagcaagtggctggtatcccccggtgatcaagtgaataaatatgaccccatcgcggaggtcatgacggataaagtgaatgcggaggtgccgtcttcttttaccggtacgattacagaacttgtaggagaagaaggccagactcttgcagtcggcgagatcatctgcaaaattgaaacagaagaaacggaaaccgaagaggcgccgaagcgggaagaagagcagaataccccttcagacaccggtgcaaaccgtcaaggtaaagatcagtcaaataaagcgcgttattcgccggctgtgctcagattagcgggagaacacggcattcagcttgaagaagttgaaggaacgggtgcaggcggaagaattacgcgaaaagacattcaaaagatcattgattcgggaatgaagcagaagtcggaagcaccggcgccggctgccgttcaaacaacgcaacaagcgccgaaacaacagcaaaaacaagcgccggcacccgctctgtcagccggtgatattgaaattccggttacaggcgtcagaaaagccatcgccgccaatatgcataaaagcaaaacagaaattccgcatgcctggacgatgatggaagtcgacgtcacgaacatgacggcgtacagaaacagcattaaagactcatttaaacagaaagaaggcttcaatttaacgtttttcgctttctttgtaaaagcggcggcgcaggctctcaaggagttcccgcagatgaacagcatgtgggcgggagacaaaatcgtccaaaagaaagacatcaacatctccattgccgttgccacggaagattcgctgtttgttccggttattaagcatgctgatgaaaaaacgattaaaggcatagccagagaaataacggaccttgcgaaaaaagtgagaaacggaaaacttactgcggaagatatgcagggcggcacatttaccgtcaataacacgggatctttcggctcagttcaatctatgggcattatcaaccatccgcaggcggcgattcttcaggtagaatctatcgtcaaacgtccggttgtcatgaataacgggatgatcgccgttcgtgatatggttaatctttgcctgtctttagatcacagagtgctcgacgggctcgtgtgcggccgattcctcggacgcgtcaaagagatcttagaaaacattgatgaacatacttccgtctattaaaaaaaactccttttgcccgggcggcaaaaggagtttttttattttcattgtgaatcctcgggaacaatcatagtgagatgatgttttttcacttcgatcgtacaaggtgttgttccgtatacctcgccatctgtatccgcgtccatctcacgtccggtttcgatttcaatcctggaggcctgaatataggacagctcccctttgaaatcatcaaacgaaccctgctccatcgtcatcagctcccgcaacgcggcaaggcttgtgttgcggcagattaacacatcggctaagccgtcctggaggctggcatcaggcaggggaactctgtttgtcccgatataatgcccgttcatgacaagcaccattacggcttcgtcttctttcacctcgccgtcaatcgtcaatttgacaggaaacgggttcgcgcttgtcatcgtccgcaaggcgctcgtgaagtagctgattttaccaagccatgctttttcagtttcattaatatggcttgatgcttcggtgatcagtccgatgccccagaagttcagaaaatagccgtcatccgttttacagacgtcaatcatccgtttatgtccggccgcgagcacttcagcggccttttgaaggttttgcgggatgccgagcgcccgggagaaatcgttgcacgttcctcccggcaaaatgccgacagcgggtctgtgatcaagcttgctgatgctgttgatgcattgatgcacagtgccgtctccgcctaaaatatataaatggtcaactgaactgtcgagattttcacaatactgacgggcatcatcctgatgtttggtcggtttaatcaaaagttcatcagctgactgggccaaaatggggacgaccgtgccgagcgttttatcaatctgtttttgaccggcgtttccgttataaattaaaactgctttccgttggctcatatgactgctcctttatttcagacaatctccttaacaagtttcccgtttttaaagggtcataaacttacatcgggaacataaaagggacaaaaaacaattggatatgagcggtgtcatttgccgatagggaggttccttgctatcataagaagagatgatcaaaaaggagaggtcccaattgaatatggattttaatttatttatgaatgatgtcgtgcgtcaagcccgccaggaaatcacggccgccgggtatacagagctgaaaaccgctgaggaagtggacgaagcgctttcgaaaaaaggaacgacactcgtcatggtcaactctgtatgcggatgcgcaggcggtattgcacggcctgccgcgtaccattccgtacattacgataaacgcccggatcagcttgtgacggtatttgccggacaggataaagaagcgacagccaaagcgagagaatactttgaaggctatccgccgtcctctccgtcatttgccattttaaaagacgggaaaatcatgaaaatggtggaacgccatgaaattgaaggccatgagccgatggccgtcgtcacaaaactgcaggaagcatttgaagaatattgtgaagaagtataagtgaaagaaaaaccccggagccaagcgcttgcggggtttttttatatggcatctgtataaatataaatgtttatacatcggcgttcagctgtcactaacctgaaaaacaatgactataataaacacagaaaggaaaatatatttttcaaaaatagtattgcatcacaattaaaaagtgtttaaaatacaagttaacgaataaatattcaaatttaagagatcagtagatatgggggaaatgaatcatgaagaaatggctgttggtattagctgccgcatgtatcacctttgcgctgtccgcttgcggatcaggcaattcaggctcagagggcggaaagaacaagctgattatgggtacatcggctgactataaaccatttgaatataaagacggcgatcagatcaccgggtttgacgttgatctggcaaaagctctaggcaaaaagaccggctatgacgttgaggtgcaggacatggacttcaacagcctgattacagccttgaagtccaagcaggtagatatgattttatctggaatgacacctacaccggaacggaaaaagcaagttgatttttctgatatttattatactgctaacaatatgatcgttacgaaaaagggaagcagcatgaaatccctgaatgatctgaaaggcaaaaccgtcggtgttcagctcggctccattcaagaggaaaaaggcaagaagctcgcttcgaaatacggttttcagctcgaagaccgcaaccggatctcagacttaaccgaagagatcaaatccgggcgttttgatgccgcgattatcgaagacatcgtagcacaaggctatttcagctcaaatcaagatctgcagggctttgcgtcagcagatgcgaaatcagacgaatcgggttccgcgattgcgttccgcaaagacagtgatctgacagcgaagttcaacaaagcgctgaaagaaatggagaaaaacggagaaatcgaaaaactgaagaaaaaatggttcaccaacgagaaataaaagaaagctcaacttttcgttgagctttttatcttgaataaagacaaaggagatcacacgtatgaatttggatttctcagcgacaatcccccaaattccttttatattggaaggccttgcggtcacattaaaaattgtgctcgtttcagcggtcatcggtcttgtattaggcatcgtgctcagcttatttaaaatcagcacgatcagtccgctgaaatggattgcggatttttatacttcgatattccgcggcacgccgctcgtgctgcagctgatgatcatttatttcggtatgccgcagcttctgggctttcagatcgatcaattttgggcggcggtcaccgcattatcgctcaattcagccgcttacgtctctgaaattatcagagcgggaatcaacgcaattgacaaaggacaaaaagaggctgccgtcgctctcggcgtgccgtacggaaaaatgatgaaagatctgctgctgccgcaggcgtttaaaaacatttctccggctattattaacgaattaatcaccttaacgaaagaatcggcgatcgtcacagttatcggtcttggcgacattatgagacgggcctaccagtccggtgccgcaacatacaactatttagaacctcttattgtggcgggcttaatctattacgtgctcgttttgatcttagcattcatcggaaaaggcgtagaaaggaagctgaaagccaatgattaaggtcgacaacctgtcaaaatcattcgggaaacatgaagtactgaaaaacatttcaacacagatcgaagaaggggaagtcgtcgctgtcatcggtccttccggttccggcaaatcaacgtttctgcgctgcttaaatctgctggaaaacccaagcggcggaacgattgccattaaagaaaatgaaattaccgcagctaaaacgaataaactgaaagtgcgggaaaatatcggcatggtatttcagcattttcatttgtttcctcataaaacggtgcttgaaaatatcacatacgcgccggtcagcgtgaagaaagagtctaaaaacgaggcggaggaaaaggcgtgcgccctccttgaaaaagtcggactgcttgacaaacggaacgactatccgaaccgtttgtcaggcggacagaagcagcgggtcgccatcgcgcgggcgcttgccatgaatcctgacatcatgctgtttgatgaaccgacctcggctcttgacccggaaatggtcaaagaagttcttgaggtgatgaaagagctcgcgcagacgggcatgacgatggtgatcgtaacgcacgaaatgggatttgccaaagaagtggcagaccgcgtattattcatggatgaagggacgatcgtggaagacgggcagccggaagaattttttctttctccgaagtcaaaaagagcacaggactttttagaaaaaatattataaaatataactggaagaaaagaagaagaatgctcttcttcttttttttgagaaagaaacaaacagaatggagcaagcaatgtttaaaatcggttaccgcacactaaagaccgcacttggaacggcgctggccatttatttagcccagctgttgcatctgcaaaacttcgcatccgcaggaatcatcaccatattgtgcatccagattacgcaaaagcggtcgcttcaggcctcgtgggcccgatttgccgcctgtttattggcgatcgtcttctcatatgtctttttcgggctgatcggctattatccgtttgcgatcggaatattgctggtgctgttcattccgactacagtcgttttaaaaataaacgaagggatcgtcaccagctcagtaatcattcttcatttatatatgtccggcggcattacgatggcgtttatctggaatgagttccagctgatcaccgtaggtatcggcgtcgcgctgttaatgaatctgtatatgccgagcctcgacagaaaactcgcggcgtaccggaaaaaaatcgaggacaacttttccgtcatcttcgccgaaatcgaacggtatttgttaactggtgagcaagattggtcggggaaggaaataccggagacgcatcagatgattcaagaggcgaaaaacctcgcctatcgggacgtgcagaatcatattttgcgccatgaaaatctttactatcattattttaagatgagacagaaacaatttgaaatcattgaacggctgctgccgaagattacctctatttcaataacggtggagcagggcaaaataatcgcccatttcatccatgaattaagggaagccattcatcccggcaataccgctcataaatttttaaaaagacttgcagaaatgagaacggaatttgaagaaatgccgctcccggcaacgcgcgaggagtttgaagcgcgggcggctttgttccacctcctcggtgagatggaacaatatctcgtgattaaaagttatttcaaaggcatcaagctgtaaaaaacatatggatcaatcgcatgagtcctcctttcattggtcattctaatgaaaaaaggaggggagcccatgcgattttttttattgtcagccgccctgctgctgtctccgctttggccgcttggcgcgaaccctttgccgggtgacccttatattatcgtcaataaagccacaaatgcgcttgctgttgtgaaggataaccgaatacaaggcatttatcaggtggcgacgggaaaaacggatgatttgacgcctgaaggagaatttacggtaacggtcaaagccgtcaatccgtattaccggaagaaaaatgtgaagggaggcgcgccggaaaacccgctcggcgtccgctggatcggttttgacgcgaaaggaaccgacggcaggatatacggcattcacggaacaaacagagaagagctgatcggggggtttgtatcaaacggctgcatccgtatgaaaaaccgggatgtcatccgtattttccggattatccctcccggaacgaaagtattgattacaaaagaaaaccgctcattcgaggaaattgcaatagagcggaaagccctcataaaaaagcaggaaacccccttgcaatgaggcgcctgcttttttaccgcaaatacatcataatgcctgagaggagggttgaaagtataaatacgcccaaaatgacgatgacggcgcttttcataaatttttgagacattgtttcactccttaagattactgtctatcattttaacgtgttttgcttgtatgaacaagccatatcctatggcggaaagcaggtggccgcgctatgaaaaaacttgatcatgtcggcattgccgtcagctctattgaagctgcgagaggattttacgaacggatgctcgggcttacgtatatgggagacgagctggtaagcggccaaaatgtgagagttgcttttttagaagcgggaggcacaaagcttgagctgattgagccgctttcggacgcgtctcccgtcagctcttttttacagaaaagaggcgaagggctgcatcatttagcattccgctgcgccgatatgaaggaaacgatcaaggagcttgaagcatgccgcatgactttgatccatcatgaaccgcaaaacggagcgggcgggaagaagatcgcatttctctctccaaaagaggcgaacggggtcctgattgagctttgtgaaacaattgaaaaaggagaaactcaagatgagcatgagtgatcatatcagacacttaaatgaaagacgttcctttttaacaaacggcggcggagcggaaaaaaatgaaaaacagcacaaaaaaggcaagctgacggcaagagaaagaattgactatttattggacgaagacagtttttcagagctgcagccgtttgccaaaagccgcatgcccggatgccagaatgctccgggagacggcgttgttaccggatacggcacaattgacggacggcccgtgtatttgtttgcccatgactttaccgtactcggcgggacgctcggcgagacacatgcggaaaaaatcgcggcggtaatggatctggcggcgaaaaataaaaccccgatcatcgggctgaacgactcaggtggtgcgagaattcaagagggtgtggtatcattaaatggatacggtcatatctttaggcgcaacgtcctttactcgggagtgattccgcaaatttctgtcatccttgggccgtgtgccggcggtgctgtttattcacccgcattgacggattttgtgattatggcggaacatacgtcgcacatgtttattacaggcccgaaagtcattgaacaggttacgggtgaacagattgacgcggaaagtttaggcggtgcgggaatacataatgtgataagcggaaatgcccactattccgcacgaacggaaaaagaggctctttccgctgtgaaaaccctgctttcttatctcccgcacggcggacagacggcattgcccgttaaaaaggaagacgccagaccgttattaaacaccctcgttcccgcggacagttcgaaaccttacgatgtgttacaggtaataaaagagctggcggatgacggaacgttttttgacattcagccgtattttggcaaaaacattgctgtcggttttctgaaactcggacggcgtacagtcggtgttgtcgcaaaccagccgaaacacttggcggggagcctcacgattgatgccgctgacaaagcgtcgagattcatccgtttttgtgacgcgtttcatattccgctattgacgatcgctgatgttcctgggtttcttccgggccttcagcaggaacatgcgggaatcatccgtcacggagcaaaattgctgtatgcttttgccgaagcgacggtgccgaaagtgacgctcatcatcagaaaagcttacggaggcgcctatgtcgccatgaattcgaaagggctcggggcagatcttgtattcgcctggcccaatgcggaaatcgccgtgatgggagcggaaggcgcggcgtcgattttatacagcagagacatacaggcttctgacgacccggagaaaacgaagcgcgaaaaaaaagccatatacgaaaaggaaaacgccggtccgtataaagcggcggcctgcggaatggtggatgatatcatccggccggaagactcgaggaaaaaattgattcaggcatttgacatgcttgcgcataaggaagaggaaagaccgaaaaaaaagcacggtaatataccgctttaaacggagggaactgaaaatggtaaacgaaaaacgtctgcttgaagaatttcttgaactcgttcaaattgattcagagacaaaacatgaagcggaaatcagcaaggtgctcaaacaaaaattcactgatttaggattgagcgtaaaagaagatgatacaaaagaagtgacggggcatggagccggcaacttaatctgtacgttaaagggcacaaaagatgcggatacgatttatttcacatcgcacatggacacggttgtcccgggcaaaggcgttaagccgattgtggaagacggctatgtaaaatccgacggcacgacgattctcggcgctgatgataagacgggacttgccgcaatgtttgaagccattaaagtgctgaaagaacaaaacatcgagcacggcaccattgaattcattatcacggccggagaagaatcgggattagtcggggcaaaagcaatggatcgttcagacattaccgcgaaatacggttttgcgcttgattcagacggaaaagtcggcaacattattgtagccgcaccgacacaagcgaaagtgagagcaaccattttcgggaaaacggctcatgcgggggtagaaccggaaaaaggcatctccgcgattacaatcgcatcaaaagcaatctctaaaatgccgctcggccgtattgataaagaaacaacggctaatatcggacgtttcgaaggcggcacgcaaaccaatatcgtctgcgaccaggttgatattctggctgaagcgcgttcattagtgcctgaaaaaatggaagcgcaagtgcagaaaatgaaagaagctttcgaatctgctgcagctgagctgggaggccgcgcggaagtggacatcgcggtcatgtatccgggtttcaaatatcaggacggcgatcaggttgtggaagtcgcgaaaaaagcggcggcaaaaatcggccggccgagcgaacttcagacaagcggcggcggaagtgacgcaaacgtcattgccggccacggcattccgacagtcaacctgtcagtaggctatgaacaaatccatacgaaaaatgaaaaaatgccgattgaagagctcgtcaaaacggcggaaatggtcgttgccattatcgaaacagcggccaactaaaaacgaagcacccagttgattgggtgcttttttcattcttcataataattggcttaaagccttgcagatacaagaaaaaaaccctgccggataggttccggcagggtttcagtattatgatttggcgggctccgcctgagccgcagcttgtttctttttatgatgcgtctgctgtaaaagtacattctgcactgtcaaaaatagtccgcttgtaaaccagtaaagcggcagcgcagccggtacgttaagtgaaaaaatggtcatcatgacagggaaaataaagaccatgatttttgctgactgcatcgcggccggattttgagcagccggtgaatatttctcgtttaatttttgggaaatataagcctgtaagaaatacatggcccccgcgcacagtgatacaagaatatcagaatgccctaagctgaaccacagaaatgagtgtgaagcgatttccggcgttgagcggatggcgtaataaaaaccgatcaaaatcgggaattgcaccagcatcggaagacatcccattgccatcggattcagattgtgctcacggtaaagcttcatcatttccatttgcagttctttttgtttctccgcatctttcgtttgtttcattttagcctgaatgctgtcgacctgcggtttgatcacagccattttttcctggaacacccgctgtttcttaaattggttcacaaacaaaggcaatacaacgatccggacgataatcgtcaccagaataatcgacaatccgtactcaccgtggaacaggcccgccacgccttttaaaagtgccgaaaacggctcgatcaggtaatcgtgaaaaaacccgatattcccgaggcctcccgtctgagtctgagatgtcgctgcaaaagccgagcggcctgtgcacagtacgataaaaaacaatccgaatgcgatccatttttgatatgttttagacaattatgtctcctcctttttatcttcacttgccgttataaaaggaggaagctgacatcttcatcatcattcgccggtgaattcatgcggatgactttacgtatccaagttgtaatgcgatgatatataataataagaaagtctgttcggttcagctgaacgactgcttgatgttcatctattcgtttcgttctccaatgctcgcctgcgcggcgctcacgcaaaagaaaagcgatgccgatcgcggtcagagcgggaagaataattgtgaaaaaatcgactaaaaataaaaagtcattcattgactcaagaatcattttatcacatccattcagctcttattttactacatatatataaggttgtctatgaaaggaaaggaggcgccgggagtggccggaaaagggagaattatatttcatatcgatatgaacagtttttatgcctccgtagaaatggcgtatgatccgtctttaagaggaaaacctatcgccgttgccggaaacgtgaaggaacggaaaggaatcatcgtcacctgcagctatgaagcgagagcgcggggcgtaaagaccaccatgccggtgtggcgggcaaaacgcctctgtccggaactcatcatcgtgcctccgaattttgaccgctaccggagttcgtcaaaagaaatgttcagcattctgagggagtatacggatttagtcgagcctgtttctattgatgaaggatacatggatattacggacacaccgcacagccacagggcgtatgagacagccgaagacattcaggcgagactgcaaaaagagcttctgcttccgtcaagcatcggcatcgccccgaataaatttctcgctaaaatggcttctgacatgaaaaaaccgctcggcatcaccattttaagaaaaagagagctgccggacgtattatggcctcttccgattgaagagatgcacggtataggaacgaaaactgcggaaaaaataaaaacgctcggcatcaaaacgatcggtgatttggcaaaaggagatgaacatgcgctgaaaacgcttctcggcataaacggcccgaggctgaaggataaagcgaacggcatccatcctgcagaagtcaatcccgagcggatatatgaatttaaaagcgtcggcaactcatccaccctgtcgcatgattcggctgactgggatgaattaacgggcgtgtttgaccggctcgcgctgtctgtgagcgaacggctccagcgtaaggaggtcatggcctgccggctgttcatcatgattcggtatgcggattggaaaacggtcacaagaagcatgaccctcagcaatccggctgatcagaaagaagacatcatggaagcggcgatggaactgtttgacaagcactggaaccaaaatccggtaaggcttctcggcatcaccggaacggaactggttgaaaaacagcaggcgtataaacagcttgatctgttttcattcaaggaggacgcaaaggatgagccgatttttcagatgatgaacgagctgaatgaaaagtacggccaaaacctgatcagaaaaggcgccgttataaaaaaagaagaaagcaaaacaaggggaacgagctttaacagagactttttccaggatgaaaagaaaaggtgaataacttgaaaaaaggggttatgtatgataatttctttagtataaatatcattttattttaatttaaattttaaaatggttaaacgtttgaagaagggacgttagaatatgtcaaaacaacaaatcggagttatcggtcttgcggtaatgggtaaaaatctggctcttaacatcgaaagccggggattttctgtgtctgtatacaacagatcaagcagcaaaacggaagagtttttagaagaggcaaaaggcaaaaatgttgtcggtacatacagcattgaggagtttgtccagtctcttgaaacaccccgtaaaattttattaatggttaaagcgggaactgcaacggatgcgacgattcaatctcttcttcctcatctggaaaaagacgatattttgattgacggcggaaatacatactataaagatacacagcgccggaacaaagagcttgccgaaagcggcattcactttatcggaacgggtgtatcaggcggtgaagagggagcgctgaaagggccttctattatgccgggcggccaaaaggaagcgcatgaactcgtgaaaccgattttagaagccatttctgctaaagtggacggagaagcttgtacgacatacatcggcccggacggagcggggcactatgtaaaaatggtgcacaacggtatcgaatacggtgacatgcagctgatctctgagtcatatttcattttgaaacaggtgctcggattgtctgccgaagagcttcacgaagtattcgctgagtggaacaaaggagagcttgacagctatctgatcgaaatcacggctgacattttcactaaaaaagatgaagaaacgggcaaaccgcttgttgacgtgatccttgataaagcaggccaaaaaggaacgggtaaatggacaagccaaagcgctcttgacttaggcgtgccgcttccgattatcactgaatctgtttttgcgcgtttcatttccgcaatgaaagaagagcgtgtgaaagcaagcagccttctgtccggaccagacgttaagccggttactgaaaataaagaagagctgattgaagcggtcagaaaagcgctcttcatgagtaaaatctgttcttacgcacaaggcttcgcccaaatgaaagccgcgtctgaagaatataactgggatctgaaatacggtgaaatcgcgatgattttccgcggcggctgtatcatccgcgcggcgttcctgcaaaagatcaaagacgcatatgaccgtgaaccggagcttgacaacctgctgttagacagctacttcaaaaacattgcagaaagctaccaaggcgcccttcgccaagtgatttcacttgccgtagcccaaggcgtgccggtaccttcgttctcaagcgcacttgcgtattacgacagctaccgtacggcagtgcttcctgcaaacttgattcaagcgcagcgtgattacttcggcgcgcatacgtatgaacgcacagataaagaaggcattttccatactgaatggatgaagtaatgaagaagcccccgcagttattgcgggggcttttctgatatcaaaaaccgcggaccgtcatgaacggcgccgcggtttttgatgttttcttatatattccaccagtggagaccgtctttttcaagaagatcgtccgaagctttcggtcccattgacccggcttcataattcggagaaagggttttgtcggctgcccacgtttcggaaatcacatcgacgaaattccatgaaagcgccacttcgtcccaatgggcaaagtttgtcgcatcaccgagcagacagtcatggattaatttttcataggcttccggtgtgttcatttcgtcactgcagttgctgcagtagtccagcttaatcggctgagcatgagcggctccgcctaattttttagcattcagatatagtgtaatgccttcatccggctgaatatggatgacaagcaggttcggatttacattcgtttcattgccgtaataaaggttcatcggaatgtctttaaattgaacgacgattttcgttgatttttctttcatccgtttccctgtgcggatataaaacggaacgccggcccagcggaagttatcgatcaacagctttccggacacgaatgtttccgtattggaatccggtgctacattatgctcatctgtatagcttggtacggagtttccgtcaatcgttcccgcttggtattgtccgcggacgaagtagtcgctcacttcgtttggggcgacagggcggagagctctcagcaccttcactttttcgctgcggatttcttccgtgttcagtttaatcggcggttccatcgccaagagagcgaccatttgtaaaatatggttttgaaccatatcacggagtgcgcctgatttctcataatatctcgcacgatcctcaacgccgagatcctcacttgacgtaatctggatgtttgagatgtagcggttattccacagcggctcaaacagcgcattcgcaaaccggatgacttcgatattttgaaccatttgtttgcctaagtaatggtcgatccggtaaatttgatcttccgtgaaagcttcgcgtatttctttgttaagctctttcgcactcggcaggtcatggccgaacggtttttcaatgacgagacgggaccagccatttgtcgctgtgacaccttcgtttttaagtgattttgcgatcgtgccgaaaaactcaggagccatcgccaagtaaaacattctgttgttcgggatttcatatgtatgttcaagctgatcaagcaggacattcagctcctgataggaacccggattcgttacatcaaacggatggtaataaaaatgagatgtgaaatcgtctatgtctttttgcccggcagaagaaacagacgttttaacggtttcccggaggtcctcgtttgaccaaggtcttcttccaacacctacaactgcaaactcttcaccaatttgaccatttttatataaacggtgaatggatgggtaaagttttcgttttgccaaatcccctgtggcaccaaatattacaattactgcttttggtttgtcgtttgttttcacttagagtacctcactttatctgaagcatggtttaaaaccccgcatatttccttcattttaaatctaaaattcgttgaaagcaaacatttcagcctgttttttgcggtttgcggaaaaaaattaatcaggccggagaaggcccgggtgaattcacattttcagcctgatcctgtatccttagtagtacaaagatctaggaggaagcattgtggaattattatttttagggacgggggccggcatgccggcaaagacgagaaatgtaacgtccgtcgcgctgaagcttcttgaagaaaggcgttccgtatggctgtttgattgcggagaagccactcagcatcagatattacatacaacaatcaaaccgaggaaaattgagaagattttcatcacccaccttcacggcgaccatgtttacgggcttccgggtctgttggggagccgttcatttcagggcggtgaagaagagctgacgatttacgggccaaaaggcattaaagcctttatcgaaacaagcctgaacgtgacggcgactcatctgacgtatcctcttaccgtacatgaaatcgaagaggggacggtttttgaagatgagcaattcattgttaccgcagcatccgtcattcacggcgtggaagcgttcggctaccgggttcaggaaaaggatattcccggcgcattgcaggccggcagattgaaagaaatgaatatcccgcccggacccgtctatcagaaactcaaaaacggcgaaacggtcacacttgacgatggcagaatcattaacgggcgggattttctggaacccccgaaaaaaggaagaatcgtcgctttttccggggatacgagggtatcagagcgggtaacggagctggcgcgcaatgcggatgtgcttgttcatgaagcaacatttgcaaaggaagatgcaaagctcgcacataattattatcacgcgacgacagaacaggctgcgcaaacggcaaaaaaagcaggcgccaaacggctgatcttaactcatatcagcgcaaggtatcagggtgaatcgccgatagagcgtctcgaacatgaggcgaaagcggtatttgaaaacagtaagatcgcatttgacttcatggaggtcactgtggagcggtcttaaaaaatggacgcttgacatttttttctgatgagatataataaaacgtaataattacgatttgaaggggtgaaaatgatgcgtgtgaatgttacattggcctgtacagagacaggggacagaaattatattacgacgaagaacaaacggacgaatccggaccggttagaaatgaaaaagtattcaccccggttgaaaaagtatacgttgcatcgtgagacaaaatagatcacgataacaaaagccattgtgccgttgcacaatggcttttgttttatcagtttaccgcctgataggcaggagcattcatttgctggcgcaccgcgcaccaaacatcataaatggcaaggtggacgatgtgcggttcatcgtgatgaatggcatgagaactgtttttggcctgaatccatccgctttgataagagacatcaagcatgcttctgtgcagtttcacccattgttcatgagcgtgctttaagcgctcatcccgctctcccgatgataaaatcaacagcggcatatcgccgaagtgaatctgctgatgcttgatctgcctaaggctcgtcaaaaattccgcgtgtgatccttccaatttgaactgtttcaaataggcggccttcatttcttcgggaagaagcggaagcactttcgtctcctgatcctcagaaaccggatcaagcagcaccatcccgagaatatcccggcggttccggctcgcccaaagtctgctgataatcgtgccgtatgaatgcgagacgacaaggtaaggaggcttgacgccggccttcagaagaagagcgtttaattcctgtaccatatggtccgccgttctcttgtttcggcttcgtccgcttttgccgattccggctctgtcatatgtgaaaaccccaaattcttcatctatgtcagcgagtaatgatgtccatgtttcagaagaagtgccgtagccggcttcaaagacgatcgtcacttcgccggcgcctttacggtgtttcgtataaaacggacacccgtcaatcagatatgtcctttccatccatgctgctttcattggagtcatcccctctaattggttctatagggaagacggagaagcttcggcaatcgtttctcaaaaaataaaaaaagagacagccggatcgaaaaactccggctgtcacttcatcaccatgctctgtcgtattgaaccggtgacggtatttcagtattcagctgcttcgctgcactccttgcaaagtgcggatcgcgcagaagttctcttgcgacaaaaataaggtcagcgcggttgttttgcagaatttcttccgccattgttcccgtcgttatcaaaccgacggcgcctgttgcgatttcggcctgttcacggattttctctgcgaagctcacttggtagcctgggaagacattaatatcagcttgaacgagtgcgcctgagctgcaatcaatgaggtcgactccctgttctttcatccacttcgcaaaaccgatatgatccgcaatgtccagccctttgtctgtataatccgatgcagaaatacggacaaataacgggccgtcccagacttccttgacagcttcaatggtctcgcctaagaagcggtagcgattttcatgtgagcctccgtattcgtctgtacggtgattggacagaggggacaaaaattcgtgcattaagtagccgtgtgccgcatgaagttcaataatatcaaagccggcttctttcgcgcgcgccgctgcctgtttgaattcctgaatggtttctttaatttgttctgtcgtcatttcagccggtgttttggactgctcatcgaacggaatggctgacggagcgtaaatgtctccctcaagctcagctttacgtccggcgtgcgcaagctgaatgccgattttagatccttgcgctttcacttgttccgtcagtttggcaaaaccttcgatatgatcatcgctccaaatgcccaaatcctgatcggaaatgcgcccctgcggattaacggctgtcgcttccacgataatcaggccgacctgtccgattgcacgcgatatgtagtgcgccatatgaaaaggctgcagttttccgtccttctcatgtgaggaatacatgcacatcggtgccataacaatacggtttttgatcgttacatctttaacggtccatggtgtgaataattttctggccatttatttcgcctcccggaatgtttttagacattgattataacaactcatgatcattcagtcatataaactgctcacaactgaacacatcgttcttattgttctggacgggcatttttttatacacagcgtggccgtatcttcataacaggcatttacagccgatcatatagcaaatatagatgagaaacgcaccgatgactgcgtggcctcctttgaaccagtttgtcaggatgaaaatactgctgatgaagatcactgcgccgaaggcaccgaatattccgtttttttgagcggctctgaaatcgtcggcactcatatttttcagctgcaagtgaatattcagtaacgtcatgatcggcagcaatgtaataacgcctgataaaaataagtatttcgatttggttaaatacgcggcggccaccataacggtgccgccgataaaaaattgaatgagaaaactcatgctgaaacgctcaccttctgtttgtgatcaagtataatgatggaaacattgccattttatttttgattgatgtataagtaaactaaatataactaatgcattggataataaagaatgatatctgggagatgaagccggttggatttaaagaagcatttagcctttattaaaacggttgaaagcggcagcctgacccaagccgctgccatattgaattacacacagccgaacatcagccaaatgatcagtaaattagaggaagagtacggttttccgcttttgatcagacagcggcatggagtgaggcccaccgcaaatggcttgaaagtgttacatattatgaaggaaattcaaaaaaactatgaaaaactgtctcaaaccgttgataatattaatgggttagaaagaggggaagtccggctcggcactgttacgagcgtggcggtaaaatggctgccgaaaattttgagggaatttaatgagctgtatccttccattaaggtgcatttgtttgaaggaaattctactgaactggaagaatggttgaaagatgaccggattgatgcggcgatcgggacatcccacagcgagaagtggcatttttacccgttggccgaggatccgattgtagcggtgatgagcccgcagcatgaattggcgcaatgtgaaacggttccgttacatgtcatggagtccgtcaaatgtatcgtgccttatccggagacacattttgatgtgctgaaagtgctgaaggaagaaaagatcacaccgcgggtcgcttatcaaatcagaggggatgaagcgattattgcaatggtgcggaacaatctggggatcagcatcttgccgcagcttttggtgaatgattgtgatgtgctcatcaaacggtttgaccggtatgtcttcaggcagctcggcattttgacagctcatgcaaaggagacgcagacaccttctgtccagaaactgattcaatgcatacaagaatgggttgcggtccgtcaggcttctgtctgaagaagcctgatgaaccgtttaagccggttcagcataatagaacagcataaaatatgtcaccggttcatccgaggaattaaaataactgtgcggcatcgcccgaagtcagcacatgcttttcgtcatcaagctcaaccgtcaattcaccgctcttgattaaaatgtatcttcccctaaatgtgattttgcctcatgggcgcagcccggcttcaggtcaactatgtcaaaaagtttgaccgtgacggtggtgagcggggttatttcggtgtcgggctttcgtttgtatataaaaagggcatcaacggcacatgctgttgatgctttttttgaaatgctagggtttggagagcacttcaattccgacgttgaccattttgtccagtcccataaaagacaggcagattttggcgcgtctttttcttttatcgatctttttaataatgccttccattcctttaagaggccctgaggcaacggttacttttgaattttcaatatagacttttgaataatctacagtgtctccttctccgatcagcctaatgatagggaggatttcttcatccttaattgtcgtgaaataggttttacgctctttggaataatatgcgccgttattcacgattctgcatgaaatggggagttctttgattttatgaaatgtccgctctgtcatcttcgttttaaacaacacatatcccggaaacatctttttgagtgcctcgtatttgattccggcttttcgttctgtgacttttttcttgggtatgattgagtagagagcctgctcatcaaactgcagacgcagaaatttttgaactgtttcttcttttccggactctacaaaaagtgcgtaccatttcatgactgggtcctccttagaataataagaaattattatacaaagaaagtatttaatggatagtatttaaagtgattaaaaatttttctaattcgtcttttttttacataatatatgaaaatgaaaaataagtatagacccaattgacagagaagcgatgaattttctttgacatgaatagggttcagggaattatctgacatttatcccgaaacaattatgccgactgtccacctaacataaaactgtggaataaatgtcagaaaataacgaaataaagccttgacattattatctataaattgatattattctctttaaatagcaactatttgttaaatttattaaattgatgtaaagcacctattaaatttcaatcgctgtttcggcacgttgaagaggaaatagggattataaaaatgattgtagtgtatatatctacatatacatgataagggagaagtgtgccgtcatggctgttttcgggcatattggcactgcagcttgtcatgcgaaacattcagtaaacaagcaagatgtctttatataaattatgttagaaaaggaaaacacaatgcgtttgcgatttttaaacctgtgctgaatcgcaaacgcgtttgtgtttttatttttatgccggtgtttacaccagtcaatatatgaaataagagacgtttttgtatggagatccacatgtgatgtacaaaattggcgatgcggaaaggatgaggataagatgcttacgtttgtgttcccggggcagggttctcaatttaaaggaatgggagccggactgtttgatgaatttcaagatctgacacgtcaggctgatgacatattaggctactctatagaagaattgtgtctggaggatccgaatcaccagctggggaaaacgcaatttacccagccggcgttatatacggtgagtgcactcagttatttaaagaaaaggaaagagtccggcagagagcctgattacgccgcagggcacagtttaggagaatataatgcgttatttgcggccggctgctttgattttgagaccggtttgcagcttgtgaaaaaaagaggggagctcatgagcaaggcagctcccggaggcatggcggcggttttggggtttaccgctgaacaagtaaaagaggttctatccgattatcatctgaccggcattgatatcgctaaccacaattcaccttcgcaaattgtgatcgccggaacgaaacaagacattgaaaaagcgggccccgtctttgaaaaagccggcgtgagaatgtaccttcctttaaatgtgagcggcgccttccattcccgctatatgaaagatgctgaaaaagagttcgcggattatttagaagaaacggcgtttttgcctcttcgttttccggtgatctcaaatcttcatgccgcaccttataagaatgatgaaatcaaaacaaatctgactttgcaaatgaccaatcaggtaaagtggacggacacgatacgccgtctgatgggacttgaaaataatgaaattgcagaagtcgggcccggggaagtgctgacaaaactgacgagtcagattaaaaaagatgccgtcccattacctatgccgaaagaagagtctgatactgctgatgttaaagcatcggcagctgatccgcaaaaaacggcgggaatgagattagggaacgaagattttaaaaaagattataacatccaatatgcttacatgacgggctccatgtacaggggaattgcttcggaacagatggtcattaaagcggcaaaagcgggaatgctgggctttttcggaacgggcggattgagtatcgaacggatcggacaggccatcggcaccatccggtctgcactgcggcaaggggaaacattcggaatgaatcttcttcatcatatgatgtcacctgacaaggaagtcagaatgatagatttatatttgaaaaacggcattcatcttattgaagcatcggcatttatgggcataacccccgctcttgttatatacagggcaaagggattaagcaggaatcatgacgggtcggtgtcagttcaaaacaaaatcatcgcgaaagtatcccggcctgaagtcgctgaggcctttctgaatccggctccggctcatgtgctggaaagacttgtgtctgacaatcggctgacagccggggaagcggcgcttgcaaaagaaattccgatggctgatgacatttgcgttgaagcggattcaggagggcataccgaccaagggattccgtatacattaatgcctgccatgatcagactcagagaccgcatgatggagaagcacggttatgcgaaaaaagtaagaatcggcgcagcgggcggcatcggcactccggaagcggctgctgccgcgtttctgctcggtgccgaatttatcggaaccggttctattaatcaatgcacggtcgaagccgggacaagtgattcagtgaaagatctgcttcaggaagcgaacgtgcaggatacgtcatacgctcccgcgggagatatgtttgaagcgggagcaagggtgcaggtgctgaaaaaaggcctgtttttcccggcaagagccaataaactctttgacttgtacagacaatacaattctttagatgaaatagatgaaaaaacgaaaacattaattgaagaaaagtatttccagcgcagttttgaagaagtgtatgagcagttgaaacgtgataaatctcctgagcagatcgccaaagccgaacagaatccgaaacacaaaatggcgatggtatttaaatggtatttttctcatacgacaaggctcgctctggaaggaaaaagcgaaagtaaaatagattaccaaattcattgcggccctgcgctcggcgcgtttaatcaatgggtgaaaggaaccccgcttgaaaattggagaaacaggcatgtcgatctgatcggcaaacagctcatggaagaaacagccggccttcttgcgcaaaggctggtatcgattacaggctgagtatgaccagacattacattttttctgcggaggacagaccatgctgattgaaaatcatgaattaacgatgagccatgtcgggttagggaatttgaatgagtacgcgctgctgctgttattcggcaacgcacacagtcaccatttaacggacggaacaggattccggcctgatcagatggccgatcaccaagggctgattttgtatccggcttattttatgacacatctcaaagttccttcagatcagcctcttgatcagtaccgattatgggacgaggtttccgtcggagtcgatatctcccggtttggagaaaccatattagaatctgattatttgttcgggccgaaaggagcggtcagctctgataaaagcgagtgggaccggggacggtttccttctatgaaagccaatagtttaattgtcgtcgacgtcacacaaacagaaggttcgacgcgcaaagtctcagcgcctaaggctgaatgcattgcggaactttctaagctagccaagccgccttacgcgctgatgcggtcaaagaaaatcagaacggacgccttcggtatgaagccgggcaatctcaaaacagcagaccccgttttatatcgggttcctattgatcaggatgctgcgcccgggcatgccatggtgtttgcgaaattcagcaagataatggatacggcggaatttgaatggatgacgcgccggtcgaagccgggttttccggtttcaatcgcgcggcatttatttttgcttgaaagagagacgtattattacggaaattgttttgcagatgaagagcttgatatttatatgacgggacacattgaagaatgcgatcccgactttcacggtgagtccctcggtatgatctcagtggcgaaaatcagctatcagattgaagtctatatgaaaagaaatcatacattgctggccatttccaaggtggacaagctgctggcggtgccgacctcttcacaagatcatattccggattataagcgggtcatcagaagtttataaaatgaagaatggagctgaaagcaaatggaacaaaccaaggaaatgaagcagatcatcgcacaaatcattcaggacattcaagaacagcagtcatatcgggccgtcgaagcgggggatgatgtgagagtcatagaggatctgggcttctcatcactggatatcgctcaattagtcgcacagatggagatggaaaccggagtagatcctttttcccaaggagaaacgatttccagcattacaaccgtcggcagcatttgtgatatttatcaaaaatatatggacagtgctcaatcatgaaaacagaaagcgggggagatatcagctgggtgactgataagcttagggaaacgcaagacagtgagtttctcatttttaaagggcagacttttacgtatgatgatttgctgacacgaatcagcttttttcagaaagaacttgaacaaaacggaatacgtgaaggagaatgtgtggcgcttatcggggattattccccgaacgccatttttttgctgatggcgcttttgttaaaccgaaatatcgttgtccctctcagcaatgaatcaagggaaaagcatctcgatatgtttgaagacgcgaaagtgaatcaaatcattgaaataaatgaaaatgacagctggacgcttcgtgcaggttctgaaagcgcctctcaccctctgcttgatgacctgcgcgagagaggggagtcaggcattattattttcacatcgggaacttccggcaaaagcaaagcatccgtgttaagcgccggccggctgcttgaaaaatataaaacggcgaagagaaaaccgctgcgtacgctcatttttctgaaattggatcatatcggcggcattaatacgctgtttgcgattctgtttaacggggggaccatcgtcacatcagacagcagaacgccggagtccgtttatcaggcggtcgacaagcatgctgtccaagtgctccccgccaccccgacctttttaaacatgctgctgatgtccaaggcggatgccggctataacctctcttcactccggctgatcacttacggcacagaaccgatgccccaatcaacgctgcgcggcattcaccggctgtttccggatgtacggctgaaacaaacatatggattaactgaactgggtatattctcaacgaaatcaaaagacagccaatccacttggatgaaagtgggcggtgccggaacagagaccaaaattaccggaggcacgctttgggtccgttctgagtcggcgatgctcggctatttaaacgcaccgtcacctttcgatgaagacggctggtatgacaccggtgaccaggtggaaacagacggcgaatatataagaatccttggaagaaagagtgaaatcattaatgtgggcggagagaaagtgtttccggcagaggtggaaagcgtctttctggagataccgaatgtccgggatgttctcataacgggaagaaaaaatccgattacgggcgagattgttgcggcagaggccgtgcttgaaaaagaggaagatatcaaatctttcagaaagcgggccgtagctcattgcaaacagaagctgcagccatatcagataccgcagatcatctctgttacagatcggaaactgtctaatgaccgatttaaaaaaataagaaacgtgtaaaacaggaggcaaatatgaataacggaaaagtagcggtcgtcagcggaggaagccgggggctcggaaaagcgattgtacagacgcttttggatgaggattacaaagtagccgctttcagccgcagtgaatctgattttattaacacattgagagagagtgaaaagtaccgcggccgcttttattgggaagcggcggatgcggcggatgatgccgccatgaaacagtttgttcttcaagtataccgcaagttttccagaatagacggcttggtcaataacgccggtttgaaccttgatcagctgctgcccctgaccaatgatgaagacattgaccgcatcctcaatctgaatatcggctcagtcatcaagctgacccgaaacgtatcccgtgtcatgctgaaacaaaattccggatcaatcgttaacataagctccattatcggctcaagaggatttaaaggcacttcagtttacagcgcatccaaagcggctcttgacggcttgacgcgaagcctggccagggagctcgggtctaaaggaatccgtgtcaattcacttgcgcccggttttgtggacaccgatatgacgaaaaatatgccggaaaaacaaaaatcgcagattatcagaaggacgccgatggggcgtttaggcgaaacagacgatatgaccggactcgttcgtttcctgctttctcctgaatcgtcctttatgaccggacagacaatggcaatagacggcggattaacttgttaaagcacagaaaaattcttttgtacaagggatggtatcctcatgaaatgtattaacgaatttttaagaacggtaatagcgcaaaagctgggtgccgaggtgaccgaagcggaagataaaaccgctttttttactcttggcgtgacgtctctcatcagtgaagaaatcatgaccatattgcataaagaatttaccggcctttctgaaacgctgctgtttgaatatccgaacattgagaaattgagtgagtttttaagtgcgcagaaacgaaatcccgaaagcgttcttgaattcaaagaaacggagcctgatacgggaagccggcaggaagaagaattgcttcccgtacaggcggctgaaaaggtgcctgtacaggaaacggacgggagctctgatattgcggttatcggaatgagcgggatgtttccgaaagcggaaaaccagcatgatttttggaacaatttaatggaaaataaagattgtgtcactgaaatcccagaggacagatgggacagctcttattactcggaagagaaaacggcagaatacgcgtcatacagtaaatggggaggttttattgatcatccggatcaatttgacccgctgtttttttctgtttccccgtgggaagctgatttaatggaccctcagcaaaaattgtatgtcacgtgctgctgggaagcgatggaggatgccggttacgggaatccggcggcgaggccgacggatcaaatcggtgtattcgccggagtgacctggaatgaatattcattaattgcacacgaagaaggtttcctcaaagatcagtacaaaggccccggctccttatattggggcattccgaaccgggtttcttatttccttgatctccatggcccgagcatcgctgttgatacggcgtgttcttcatcgcttgtcgccgtccatcaggcttgtcaggccattatgtcgggcgactgtgaaatggcgcttgccggaggcgtcaacctcagcttacatccgcaaaaatacatgtttttaagccaatcgcattttctgtcttctgaaggaaaatgccgcagtttcggtgaaggcggagacggttacgtgcccggtgaaggtgcgggagccgttttgttaaaaccattgaaaaaagcgattgcggacaacgaccacatctacggtgtcattaaggggtccgccactaatcacggcggcaaaacgaccgggtatacggtgccgaatccggaagcgcaccgggacctgattttatccgctctaaacagagccgcggtaagtccggcggatatcagctacattgaagctcacggaaccggcacggcactcggcgatccgattgagatacgcggcctgtctatggcatttgataaacagaccgatgagaaaaactactgcggaatcggctcggtgaaatccaatatcggacatttggaagcggctgcagggatcgccggtttaatcaaggtgcttttaagcatgaaacatgaaacgcttcccgccagtctgcactccgaggaactgaaccgcaagatttctttttctgattcgccattttatgtcgtccgaaacaaccggccgtggccggctgaaggaaataaaccgagaatcgccgcaatcagttcattcggcgcaggaggctctaatgcccatctgatcgtaggtgcttatcagccaaaacggcaagcggacgggaatactgagcaaaaaccgcatgccgtcgtattaagcgcacattccgaacagcagctgaaagaatatgccgggaaattaagctcttttcttgcccgattggaaaacctgccttctgccggcggatacagtctggaaaatatcgctgccaccttattgtcaggcagagagcctttctccttccggcttgctgtcattgcatcatccctttctgagctgaaacagcgattggacggatttgtaagcggtcacagcgacggcaggcatatgtacttcggaaaagcgtcacccgggcggccggacgtttcaggccaatccgtttcagatcctgagaaatttgccgcgctgtgggtgaaaggccttcagtgttgcaaaaagccggaaacgccgtatcagaaagtcccgcttcctacgtatccgtttttaaaggaaacgtcctggctgaccgatcaaaaaaagcggtatacaaaaaagccccaaaatatcaaaaggcgtgaagcgctgcatcctctgcttgatgagaatatttcatccgcccggaaagggacgtttcaaaagatattttccaaggatgaatatttctttaaagatcatttagtgaacgaaaaatatgtgcttcccggagtctgtcatctggaaatggcggcatacggcgcgggattgtggggagaacgcccggtcgtctctcttcaaagtgtgtggtacatggagccgattgtgacagggacagacccaagatccgtcatgatagagtttgaagcagaaaaagagcgtataagctatgtcattaaagaaaaaggagcggacggcaccctcttttcgcaaggagaagtgatttgtaaagaaaaaggagcgtcttttgaggccccggcctttcagctcccggcgccatttgcgcagagaacggagccagaagacatctatcactcgttctctgaggcgggaatcgtgcaaaaggacagttttcaggtcatccgcgaattctcttatacagaaaggaaagcactggccaaattaacgctcccgtcacacttggaagccgattttaaacagtacatcctacatccgtccttaatggatggcgctgttcaaactgcaatggcgcatgtgctgcaatttcaaaaagagcctgtgcttatcgtaccgttttccttcggagaaatacagctgcttgaaccgttagcgaaaaccgtatttgtgcatgcggaggtaaaagcggcctctgttcaccaatttgatctgcatatttgtgatgagcgcggcgtgctgttggcggcagtgaaagattttatcataaaagaggtgcaggaaagcgccgggtttaaccaaaaagccggcgtcacgccgaagaaaagctgtgaaacggaattgcttatgacaccggtttggaacaccgtcaccattccggaaaccggcatgtctttcatgcgtgaagaaaaaataatcgtcatcggggccgggccggattttcagcaggctttgaaagagatgtattccgatgtccgttttccggacatcacttctttggatagcgcggaacaaatggctgaaacattgaaagcgcaaggctcttttcaacacatgatatgggcggcgccggatcatcccattccatccgtttatgatgcggatacggccgagggacaggagcacggggtcatgcagcttttccggctggtaaaagcgcttctgcttctgaattttgacacggaacaactatcattgacaatctgcacgtttcaagcacagccgattcatgaacatgatgaggtcaatccgagtcatgcaagcatacacggattagcggggtcgctcgcaaaagaatacagcaattggagcatccggcttcttgatttggaatctcaaaggggagaccggcatctccccgatgtcttctctttaccggcggactccgagggaaatccgtgggtctttcgtgcaggtcagtggcaccgacagcaattggccgtctgccagcctcatgcagatgagccttcattataccggcacggcggggtttatgtgattatcggcggagcaggcggaataggagaagtatggactgaatatatgattcagacctatcaggcgaaaattatctggatcgggagacggaaaaaagatacacagattgaaagaaagctgaaaagacttgcggctttaggccccgcaccgcaatatttcagcgcggatgctgccgattatgactctctcaaacgggcgtatgacaccattgtaaaggaaaatggaaaggtccgcggaatcatccattccgccatcgtgttatcagaccgcagttttgccaatatggaagaggatcagttccgcgcgtcactttctgcaaaaactgatgtgagcttgcagattgcccgggtagctgaaggggaacccctggatttcttgctgtttttctcttcgatgatgtcgtttcaaaaagcgccgggacagagcaattatgccgccgggtgcacgtttaaagacgcttttgctaagcggatctcacagaaagcgccgtatgccgtaaaagttgtcaattggggcttttggggaagtgtcggcgttgtcgcttcagaacaataccggaaacggatggagcgggacggaatcgcttctattgaggcgcccgaagcgatgaaaacgctggaaaccctgctttccggacctcatgaccagctggcgctgatcaaaacgacagatccggtttttatgaaagacgatctgaaagaacaagtaacggtttatccggaaaagattccttccgcactcggacaattagcggttaacatcacgcagaatgacgaagctgagcggttaaaagcatcaagtgtcatgagctgcatgagagagatggaatcccttattgaaaaaatgcttgcatcaaccctttatgagatgggagccgggcttgatcaggctttgccgttatttcaatcggctgccggcataacggaacaatacagcagatggctgaaagagagctttgtcctcttgactgaattagcgcttgctccggaaaaaacggatctagggcaggtgtgggaggaatgggagcggaaaaaagagacttggctgcgccagaaagacatgagggcgcatgtcagattggcagaagagacattgcgtgtgcttccagacattttaaccggaaagcttccggcaacggaagtgatgttccctgactcctccttccgtcttgtggaaggcatttaccgcaataatatcatttctgattttttcaatgacaagcttgctgacacattgattgcagttttgaaggaacgtctggaaaaagacccgcaggcgaaaatccgcattttagaaatcggagccggaacaggcgggacgagcgccgcggtcatgagaaaattgaaaccgtatgaagcgcatattgccgaatattgtttcacggatatttctaaagcatttcttttacatgcagaagacatattcggtccggaatatccttatgtcacttataaaatattcaacgctgagcagccggtatcaacagaagcgccggacatcggcacgtatgacgcagtgatcgcgaccaatgtgcttcatgcgacaaaaaatatccgctctacgctgcgccatgcgaaagcaatgctgcaaaaaaacggccagctgttaataaatgagatcaacagccgcaccatattcaaccatgtgacgttcggccttcttgaaggctggtggctgtatgaggatcatgatttacggattccgggctgtccgggggttgatccggccggctgggcggaagcgctttcgcttgaaggattcgtccatcctctgtttccggctgaaaccgcacacgacttaggccagcagattatagcggctgaaagtgacggaacggtcaggcttgccctcacgcaggcgtcagaagagaagccggagcgccgtccgtatgacgcagaaggtctttcggatgatactttgcacttcagcctgagagaaaaaagcgttgaactgatgaagaaggtaatcggtgaagcgcttaaagtgccggcgcatcgtcttttatcccatgaacctttaaccgcatacggattggattccatactggtcgtcagactgaccaacgcgttaaaagacgtcttcggttctgtcagcagcactttattttttgaatatcaaaccattgatgagcttgctgattactttctgtcttcccgtaaagaagcgctcgagcggcaattcgggaatggacgggctcatcccgaaaacgccggacgggtgcaggctcccgcagaaagcgccgcgccgattccaaacgtaagagaacggggcatcgcatatctgacggaattaataggaaaaacgttgaagattccgagcgggagaatggatccgtcggtttccttaaccgcatacggtttggattctattctggtcgtcaggctcacaaatgcctttcgtaacgtgtttgaccaaatgaccagcaccctcttttttgaatatcagacgatagaagaaatcgcggattacctgcttctttctcagccggaagcatttatgaaagcgatgggtgtgcgtgaggcacagctggctgatcacacagataatctgaatgtaaaacaaaacaagattcctcaaaacgaggaaggcagcaggacgaacggagatccctatatccaggatatcgctgtcatcggtctgtcaggccggtatccgggcgccgatcacgttgatgagctgtgggaaaatgtaaaagccggcaggcattctattactgaagtgccgaaagatcgctgggactggaaaacgttttataacgaggaacgcggaaaatgggggtccatttattcaaaatggggcggttttctcgatgacattgataaatttgatccgctgtttttccgtatatctcccgcggaagctgaaaggatggatccgcaggaaaggttgtttctgcagactgcttattcaagcattgaagatgcggggtacaccccggccacgctttgtgacagccggaaaatcggagtctttgtcggtgtgatgaacagcaattacccgacagttcccagcgactggtctatcgcaaacagagtatcgtttttgttcaatttccaagggccgagtatggctgtggatacagcctgctcttcttctttaacagctgtccatctcgccgcagaaagcctgcggagcggaatgagtgaaacagcgattgccggcggagtcaatcttatcgttgatccggcccactatgagcggctgtccgctttttcaatgctgtctcccggtgataaatgcaaatctttcggagacagtgcggacggttttgttgacggtgaaggagtaggggcgattgtgttaaagccgcttgctcaagcggagaaagacggcgatcatatttacggcgttatcaaaggaagcatgctgaacgcagcaggcaggacaaacgcttatatggtgccaaatccgaaagcgcagtttgatctgatcgcagagacgttgaaacggacagacattcacccgagaacggtcagttacttggaagcccacggaacgggcactgcgctcggtgatccgattgaaatcgacgggttaacgaaagcttttcgcctgacaacagaagaccggcagttttgttccatcggttccattaaatcaaatatcggacatttagaaagcgctgccgggattgcggggatcaccaaactgcttctgcaattgaaacataagaggattgccccttcattgcatgcggcggaattgaatccgaatattgagtttgagcacactccgtttttcgtacagcaaaaagaaacggaatggaaacgacctgtcttgaatatcacgggtaaaatgaaggaatatccgagaattgccggcatttcctcgtttggagcaggaggttcaaacgcacatgtcatcattcaggaatatgtgccgtctgacagcctgaaaccaatggaaaacgcgtctgtttctccgcaaaaaccggctgttatcattttatcagcgcgaaatgagcagcaattatcagagcgcgcccgccagcttctggatgatgtcataagaaaaaaacgttctgacggggatttggccaagatcgcttacacgcttcaggcgggaagagaaccgatggctgagcggcttgcatttacggccgagtcgatagaagaactgaaaatgaagcttatgagtttctcaaacgatcataatatcgaacatgctcatatctggcggggcaggacagccaaacatcattcattggcggcttcgctcacttctgatgaagatatggcgcttaccataaatgcctggctgagaaaagggaaatacggaaagctgcttgacctttgggttaaaggacttgacgtcgattggtcagctctttatcagtgcaacccgggccgcatcagtctcccggcctacccttttgccaaagaccgatattgggtcacaaaagctgatgtgtcacttgacaaaacaggctcagcgaaaagtgagaaagcagccagacttcacccgctgctccacgcgaatacatcgacctttaccgcccagcgttttacttctgttttttcaggacatgaaccgttttttgccgatcacatcgtcaatggaaaaccggtgcttccgggcgcggctgctttagaaatggcccgggccgccgttacatttgccgccgaagacttgccgggcgggaaaacgggtgtaaggctcaaacagatcgtttggctccgtccggtgacggcgctttctgaaggagtgacgcttcatgtaaagcttcagccggaagaaaacggagacatcgcttttgaagcgtatgccgaaggagaagagccgcttgtctttttccagggaaaggccgtgctcgaagagacggagcgtgctcctgttctcgatgtagaagcggttcaggcgcgctgcggcggccgtcacttgtcaaaggctgagtgctatgaagcgttcgacagcctcggcatcacctacggaccgtctcatcaggcgcttgacgccgtctatgccggaagcggagaagtgctcgcaaagctcactcttccgccgtccgcccgcgaagaaaaggagccgttcatcctgcatccgagcatgctggacgccgcccttcaggcttctatcggtctcgtgctctcagacggttccgcgtctggacggccgtttctgccgtttgccctccaggatatgcaggtgttttctgcgtgccgggagacgatgtgggcggtgctttcctcagcggacggcgcctatcatattgagctgtgtgatgaaaacggtgcggtatgtgtccgattgacggggctcaccgcccgttttctggaagaggaaacggaggaaaaaccgctcttgcttcagccaaagtggcaggaatcaccgccggatgaaggcggcggacaagaagagtctttcagatacgtgacactgtatggcggaatgaacgctgaggacataagcggcgccgtatgtgcggctgacggcgaaggtccgattgaagaccgttatgacgcctgcgcggcggagctgtcagcgatcgtcacgcgtcttatcaaagaaaaacagaagaaaaaaacgctgatccagcttcttgtccccgacaggggggaagacaatgtattggcggggctggccgcttttctgaaaacggctcaccttgaacatccgaagctgtacggccaagtcatccaagccgatccggacgagtcagcctcggcgcttcttgccaagctgaaagaaaaccgggcgcatcctgaacaagcggaaatccgttatgaagccggcaaacgtctcgtcagaaactggcgtcatctgccggcgcctcaaagcggcgccgttccgtggaaagacgaaggggtctacctccttaccgggggagcgggcggcatcggcctcattgtcgctgaagaaatagccttccgcgtcaaaaacgccgttctcgtattaacgggaagggcggaagcgcttgataaagaccgctccgcccgcttacggcgcttggcagcgacgggtgcccgcgtattgtatcaaccggttgacgtgacagacagggcggcggtcatcaccctcgtccgcggcatacaggaggagcacggaacactcgacgggatcattcacggcgccggcgtgatcgctgacaattacattctgaaccagacagaaaacgaacggaagaccgtcatggcgccgaaggtgaaagggcttatcaatcttgatgaagcagcgaaagatgtgcggctggactttttcattctgttttcttccttggctggaggtatgggaaatccggggcaggccggttatgcggcagccaacgcatttatggatgtttatgcagcccgccggaaccgtctcgtgcgggacaacgagcggagcgggcagaccctgtccgtcaactggccgctttgggaagaaggcggtatgcgtgtggacaaagagaccgaacggctgatgtacgaacagaccggaatgaaagccatgcgatcggcctcaggcatccaagcgctttacgccgcttttgcctccggagaacaccaggtcatggtggcagaaggcgacgaaaaacggattcgaaaaaacctgatgcctgaaacaccggaaccgtccaatcgcattcatgtgtcaaggaagacgcccgtccatataccgaataaagtacaagcggaactcaaacatatgatatcaggcattctgaaggtgaaagaagacgagatagatgctgaatcagagatgagagattatggctttgattcggtttcattcacgcagtttgcaaatgaactaaataaaacgtatgggcttgaactgacaccggccgtattttttgaatacccgacagtctttcgttttgcccaatacttgctgacggaacatccggatacattcggctcacaggaagaaacagaaacggagaaaccggttgtgcgtaaaaaaatgaagacggagccattcttgattccgtcccgtcttcctaaaacaaaaaccgcagctgcacctgagcccgtggcgataatcggaatcagctgtgcatttccaatggctgaaaatccggaaatgttttgggagaatttagccggagaaaaggactgcatttctgaaataccgccggagcgctgggactggagacagtattacggagatccgcagaaagataaaaatgcgagcaatgtaaagtggggcggcttcattgatgaaaccgctcaatttgaccctttatttttcggtatttctccgcatgaagccgaaatgatggatcctcagcaaagacttttaatgatgcatgtatggaaagcgattgaagatgcaggctgctctgccaaaagcctgtcaggtacaaatacaggcatttttgcaggcacgacaaacagcggttacgctcaggaagcttcaaagttccatatagagattgagggttcttccgccgccggtacggttccgtcaatcggtccgaaccgtatgagctattttctgaatatacatgggccgagcgaaccgattgaaaccgcctgttcaagctcattggtcgctgttcaccgtgcggtcagggcaattcaggccggagactgcggcatcgcgattgcaggaggcgtcaatgctattgtatcgccggatatgcatatcagctttaataaagcgggaatgctcagtgaagacgggcgatgcaaaacattttccgatcaagcggacgggtatgtcagagctgaaggtgcgggcatgattgttttgaaaacattatccgatgcggaacgtgacggcgaccgtatttatgccgttattcgcggaacggcggaaaatcatggcggacgggcggcttcccttacatcgccgaatccgaaagcacagacagaagtcatgataaaagcttatcagcaagcgaacatcgacccccgtacagtgagttatattgaagcccacggcacgggaacggcgctcggagatccgatagaaatcaacggactcaaagcggcttttgcagcgctttatcagaaagccggagtaacggcgcccgatcagcctcattgcgccatcggttccgtcaaaacgaatatcggccacacagagcttgccgccggcatggccgggcttttaaaaattattttgcagatgcagcacaaaacgctcgttaaaagtctgcattgtgaaaccgttaatccgtatatcagcctcgacggcagcccgttttatttcgtccgccacactcagccgtggaaagctgcgactgatgatagcggaaatgaactgccgcggagagcgggtgtcagctcgttcggatttggcggtgtcaatgctcatgtcgtgctcgaagaatatgtttctcctgttgaagagaagcaatggacggccggtgaacttcagccgtccttattcattctctcggcaaagacggcggaacagctgaaggaacgtgcggaacagctgtgcagatatttggaaaagacacattcagctgacggagctcttgcgggtatcgcttatacgcttcagcttggccgggatgaaatggaagagcgtcttgccgtcattgctgaaacaaaagaagagcttacgaacgcgctgaatgatttcctcagcggcaaggagacggggcagaatttctttacaggccggaacaaagcgatgaaacagctgtttacagagatgacggacaacgcagaaatgagcgggaccgtagatcaatggattgaagcaggaaagtatacaatgcttgcaaaattatgggtgcaaggtttacatgtcgactggaataaattatatccggacgaaaggccaaaaaaagtcagcctgcccgtctatccttttgcgaaaacacattgctggataccgcacagtgcgcagcatataaggcaccgggagacttatgagactgatacgtccccgcttgagacttatgagcgcctgcttgatgatttggagaaaaacgaaataagcatagaaaccgctgtaaaaagaacgatcggtttttacagggattagcgtaatggaggaaaccatatgaaagagtttctgcaccgggttttttctgacgtcaaaaataaaaaaatgacaaaacaggatgcgatcggcattttgcgcgattatgatatgcggatgggacttcgccaagcggcttcccttcatccgcttgctcagcagcatatttccgatgaaacgggacagggattctcggcagctttcagcggccgggaattttttctcgctgatgtttctttacagcgtaaaaagcttatgcccggagaacttcttttggaaatggcgagagctgcggctgttttgacagtaaaggagactgaggctgtccggctgacgcatatcgtgtggtcaaagcccattctgactgaggctgagccgttccatatcgaaatcaggctgatacccgcagagggtgaagccaaaaggtttgagatttataatccattttctgccgatttcagtcatcatgatgtgtacagccaagggacgattcagccagttgatgctgcgcctggcatgctggatatcagccgcttgaaggaaaacagcggttccctgatggatcagcagcaaattgaagccatcactcagaacgataccgttcaatacagtgagcacatgaaaggaatagagcgtatttacgcctcagcaggacggatgctggcagacatatcaattccattgacagaccaaaaagaatccgcacgattcggcctccctccctgtgtgatgcaaagtgtgacagaggcatgcgcgctgcttggcggcaaagaatataaaacgctcgccccggtttcattggacgagcttttgttttatgaaccttgtcctgacaagggatgggccgagatacaagagaaggcggggagcttttatattgatttatgtgacgaagaaggaaaaatatgggcttccctatcagggttgaagctgcagcctgtcatcaagacgggcgctcccggaaaaaccaatgccgaacaccgcagtgaacgtttgtatgaacaaacgcttcttcagctcaaaacgctgtttgccctgactacaaaaattgctgtttccaacatagacactgaagagccgctggaaacctacggaatcgactcagttactgtgacgaaattgaaccgcgaattgtctctgcttttcggtgacctttccaaaacggttttttacgaatataagacactgggctccctggcagctcactttgtcacggattatccaaaagaatgccgaaaatggacaaatgatgatgaccaccgttcaggcatatcagaacaggttttggcaaatgaagattttccggtgcttccgtcgtttatcaagcgaaagaaacggccttctttttccaatgagaaccagacaaaagaagggattgcgattatcggagtcagcggacgttatccgcaagctgaaacacttgaagagtactggaataacttagcggccggaaaagactgtgtgacggaaattcccgaagagcgctgggcaaaggacaagtactacaaccctgatcctgaagcggccgtgaaagaagggaaaagttacagtaagcggggcggaattctgaaagatgccgctttctttgatccgctgttttttcaaatttcaccccgtgatgctttgaatatggacccgcaggagcgtctctttattgaaatgtgctggcaggtgctggaggatgccggttatacgaaggaacagcttgagaatctgtataacggccgggtcggcgtttttgcgggcattacgaaaaacgggtacggaatgtactggaaaaacggcggcgccctgcagccgaaaacgtcgttcagttcagcggccaacagagtttcctattttcttaatctgaaagggccgagcatgccggtcgacacgatgtgctcatcttcgctgactgcaattcacgaagcgtgtgaaaacatccttcgcggcgaatgcgacatggcgattgccggcggtgtgaatgtgtatacgcatccttcggcttatgcggagctcagcgcctatcgaatgctttcaaaagacggaacgtgcaaaagtttcggtgaaggcggggacggatttgttcccggtgaaggtgtcggggccgtgctgttaaagccgctgtcaaaagcgatggctgataaggaccatatttacggggtgattcgcggcactcatatcaatcacggcggcagaacaaacggatatacagtgccgagtccgagcgcccaggctgacgtgatttccggcgcgcttgaaaaatcaggaatacatccgcggatgatcagctgtatcgaagcacacggcacgggtactgaactcggagatccgatcgagattgacggtttgacccgcgcatttcaaacgaaaacgtcagataaaggtttttgcgccatcagctcagttaaatccaatatcgggcatttggaagccgcggcaggcattgccggtgtaacgaaactgctgctccagcttcaaaaacgaaagctggctccctcattacattgcagaaaattgaatccgaatattgcattcgaccggacgccgtttgtggtgcagcgtgaattggcagactggaaacggccggtcattgaggaaaacggagcgcaaaaagagattccgagaatcgcgggaatctcttcttttggcgcgggcggggcaaatgcccacatattgatagaagaatatattgaacctgatagggagatttatgagccattcacagatgaagatcccgcagtcattttattatccgccaaacaggaggccagcctgaagcagcgggcgcagcagctttttcaagcgatcagaaaaaatgacgtcacagaccgcagcctccgggatgcggcttacacccttcaaaccggaagagaagcgatggaagaacgtgcggcgtttatcgtgacgtcgacagagcagttagcggaaaaactgcagcgttttattgacggcgggacagacggctgcttcaggggaaaaagcaaacagtataaagacattctagccgtttttaaggatgaagatatgcaggaagccgttcgtaaatggatgaaaagaaaaaaattcgcgaagcttctggaactttgggtaaaagggctgaagattgaatggtcagagctttataacggcagcctgccgcatcgcatcagccttcccggttatccatttataaaggatcggtattggccggacgatgcagcgccggacaatgttcgtgatgctgaaacacattctgaaacatttcgtgaaatccgctttttacagaaaagctgggcagaaagcagccgtgttccggctaaggaagtgcggggcgtcatcggaatagctgctgatcaccagacaggaaatttagccgttgagctgtcccgttatttccccgagtctgaaatcattgacgctgcatcaccggaaatatccggggacgcggcccgatttggcggtctgattgatgtgaccggatgcgggacggaaatcaatcatgatgacggctggattcatcgtctgcagtctctcattgacaacagaaaccgcggccgaaagcttcagctgctttgtgtgacaaaggggcttgaaccctttgcaaatgaaacgataaatctctcaggtgcaaaaaaggccggattgtaccggatgctccaaagtgagtataaggatatccgctcgcggcatatggatgcagaacggactgccgaagatcctgagctggcaaaccagatcgcagaggagttttttcgcgattctgaagacatcgaagtgtgttaccgaaacggtgtgcgctatcacgcgcggttaaaggaaacaaacagcttagctgaaaaagaattttcatttccgaaagaccatgtgctctggatcaccggagggacccgggggctcggatatttattcgcctggcattttgccgaacgatacggagtcacgaaactcgtgcttaccggaaaagaaacaatgccgccgaaagcggagtgggatgatcatatcaaacggaattccccgttttccgaaaaagtgagaagaatcagagagctcgaacaaaaaggtgtccgaacggaagtgctgtctgtatcttccggccctgaatatgagcaggctgtcagccgggtgaaagagaagatgggcccgattggaggcgtgatacacgcagcgggagccgtagatctcgatcatccggcctttatccgcaaaacgagagaacagatgatgaccgtgcttgaacctaaaacagacggactggaccttttgtatcaagcgctgcacaaggagcctctccggttttttgcgctgttttcttcagtgtccggcgtgatgccggaattaggagcgggacaaagcgattatgccatggctaacgcctatatggattattttgcggccgcaaaaggttttccggtgctgagcatccagtggccgagctggaaagaaacgggtatgggcgaatcaaaaagccgggcctatctgaaaagcggtttaaagagcatcactgacagagaagggttgagcctgtttgatgccatcatggcaggcgattgcggatctgttattatgccggccgtcattcacccggaaaaatgggagcctgaccgtctgctgctttcatccggccttactgaaacaaagcagcaggaacaggccgatacagaaagcgttaaggagtggctgacgggcatttgctgccgggaattaagactggagccgtcaagatttgaatctgatacaccgtttcaagattacggagccgattccattatgcttgcccaagtgtccagagcgatcggaaagaggatcaaagctgaccttgacccggcggtgctgtatgaataccctacggttgctgcgctggcgggatggcttgaaacagcatatcccgaaatcaaagctgccgtttcaaaaccggttcagcctgtaatcccggacgttcccaaacaaactgcagccgctgttattcagccttctggtgctagagcggcgcaggacattgctgttgtcggaatgtcctgccgttttccgggagctgaatcaatcgaagcttattggaagctgctgtctgaaggaacgtcagccattcaaagagttccgaaagagcgctggaaaacggagaaggcggattatgcgggccttttacaaaatgtaacgcattttgacccggagtttttccttattcccgaagaagacatcaaggcaatggatatccagtcctttcttatattagaagaggcgcttcatctgttcagagacagcggttactcgttacaagaaatgaaaggcaggtcagccggtgtctatttaggaggacgcggcggcagtatgcctgatgaaaaccgtctgaagcatgcaaaaaatccgatagtcgccgccggcccgaattacttggcggccaatctttctcagttctttgatttgaaggggccgagtctcgttttggatacggcctgttcttcagcgcttgtcggtatgaatatggcgatacaggcgctttcttgcggtgaaatcgactcagcggtagtcgggggagtcagtctgctggaatccggtcaaacccaccggatgttcgaacttcgcaatctgttaagcgaagagcctgcgtttcatatttttgaccgccgcaccggcggcatcgtattgggagaaggcgtcggaatggtgtatttaaaaacagcggcccaggctgtaaaagacggtgaccggattcatgcggtcattaaaggcatttccgtaaacaatgacggcagaaccgcggggcctgccacaccgaatatacaggcgcagaaagaagtgatggccaaggcgcttgccaaaagcggcagaaaagcggaggatatcagctacattgaagcaaacggttcaggctctgaagtaaccgaccttttggaactgagggcgattgaagcggtctaccgtatgcaaaacagcgcgccttgtgaattgggatcgatgaagccgaatatcggacacccgttatgcgctgaagggattgccggattcattaaaacagtgcttatgctctcgcgccgaatgcgtgtgcctttcctttcgggcaaagagccgatgacgcattacgatctgtccgcctcgccgttttatttttcgcacgctctgcgtgaatggacggattcaccgcggattgccgccgtcagcagcttcgctgacggagggacgaatgcccatgtcatagtggaagcctgggagcaggaggcgtataccccggttagaaagcctttgccgagacaggaattaaaacgccggcccatccgtccggacaaaaccgaaagcctgcatgaaaacacacataagtcccgtccgaatacgttttggaaacaaatgaagacttactgattgcgctgaaaattgaacgtcgatatggaggaagttcatatgcaagagcagcttcttattaacaatcagcatcccgttctgaaacatcataaagcctatggaaaggaactgctgccgggtctggcttatattgacctgatctatcagactttcagagaaaacggcttttttcatgccggccttgaactcaggcacttatcgatttttcaccctttagctcctgaacagggagaaacaatcctgctttccgttgactgtacagagaacggcgaagggcagtggaaggtggaggtgaaagggcaaaaacaaggtgacgaagcagcagagacaaaggtatatgccgcggcgcaaatgcattccgtcaagcccgccggcttccaagagagcgtccggatggatgccgtaaaacaaacggcggcagaaataccgcttgaggacatttacgcggaatgcagggatcaagaactggttcactcaggaatgatgaaaggctgcggaagcgtctaccaaactgaaaaagagatttatattgatctgtcggtgcaaaaggatcagctggaacatgcagaagaggcgatgtttcatcccgcattgatagatgcgagcagcatcggctccaatgtatatctcgctcctttgacgagggaggaggggcaattatttctgccgctgttttatgaatcgttttattgcaccgaattgctgcagacgacatgtatcaccaagataaaaaaagaatccgtcacccgtaagaaagatctcgtttacgtgacaatggagtttttcaatgaggaaggcagaaaagtcggcgaactgaaaaacttcgccaataaactggtgagggacccggaactgatcaatcagaaacggcaaaagaaagaacctgacgggcggaatgccgtcccggctccgcaagcggaaccggcgccttctgagccccgccgtgcggaggcttccgccggccttactgaacagtgcatcctttatttaaaagaattgcttgccgcccgattgaacaaacctgtgaaagagattgacccggatatcggctactatgaaatggggctggattctccggggctgttggacatggtaaaggaaattgaacgaaaaatcggaacgcagcttctgccgacactgttatttgaatacacgacaatcgcggaattggcgggatatttgtgcgaacattacggagccggtttcggccatgctcaaagcgggcattcaagtgctgagcctttgccccgggaaaaaaagaggacgacccaaatccgcgtgaaaaaatcggcgtcagccggaacgcagaatggagatattgcgatcgtcgggatggcgggacggtaccccggcgccaaaaatcttcgtgaattttgggcaaatttaaaaaatggagaaaacagcgtaacggaagtgcctcgttcccgctgggatacgaggacatatgagcatttgcgatcgccgtccggcaagccgatttccaaatggggcggttttatagacgatccggattgttttgatgcgaaattttttcggatttctccgcgggaggcagaagctaaagatccgcaagaacgattgtttttagaaacatgctgggaaacgattgaggatgcaggctacaccccggaaacaatcgttcagccgaaagggccgaataagagaatgaacgtcggtgtgtttgccggggtgatgcatatggattattctctcgccggcgctgaagctgcggccaaagggctggtctttccttatcccttgaactatgcgccgatcgcaaaccgggtttcatatttttgcaattttcacgggccgagcatggcggttgacacggtgtgttcgtcatctttgacggccgtccatatggcggcggaaagtctgagacgcggtgaatgtgaagcagctcttgccggaggcgtcaatttatcattgcacccgacaaaatatatcacatacggcttgatggatatgcattcgagtgacgggctgtgccgcacgttcggcgaaggaggcacaggctatgtctcagctgacggcatcggagccgtgctgctgaagccgctccacaaagccgaagaagataaggatcatatttatgcggtgataaaaggcagcgccgtcaatcacgtggggaccgtcagcgggattaccgtgccgagccccgtggcgcagggggatatgatagctgaatgtcttgaaaagacggggatcgatccccggacgatttcttatgtggaagcgcacggaaccggaacttctttaggagatccgattgaaatacaaggtcttgttaaagcttaccgcacgtttacggaggatcggcaattttgtgcgatcggttccgttaaatcgaatatcggacatgcggaatcagccgccgggatcagcgggcttcataaaacggttttgcagctgtttcacaaaacgcttgtcccttctttgcactcagagacgattaatccgtatctccgtttagaggactcgccattttacgtgcagcaaaaaaccgagtcatggaaaaggccggcgtatacagagaacggccgtgaacatgcctgcccgagacgcgcaggcatcagttcattcggggcgacgggttcaaacgttcatctcattttagaagagtacaggcctaaaaaccccggtattacggaggatcaagagagaccgtatatcgtgcctctatcagcgaaaaatccggagcggctgaaggaatacgctgcccgcctgctgatgtttctcaaagataaagcgcttgaaggaagcggtccgcttcatgacaaaagagatacaatgcaaaatcagctggaaaatgcgttgcgaggtgttctggccgaagttctgcatgttgcggccggctcggtagatgatgaacaggattggaaggaattcggcttggatgtcatgcagctgacacatttttctgagctgatgacggatcaatacgggctggcaatagacatgactgatctcatacagcatacttccgtccggactttagcagaatgtcttacaaacgatgagaaacataagaatattctttccggtcttttcggccagtcgggcttagataagcagcctgatgaatctttttccttgcggtcactggcgtatacgctgcaaacgggacggctggcaatggaagaacggcttgtttttttagtgaacgatcaagcagacctgatcaggaaattaactgaatttacagaacgaaaacagcagattgacggctgctttcaagggcggtctgatagcggaacggaaatcaggggtttcctgaatgatgatcaggatacggaggagctgatccgaaaatggatggacagcggcacttacaaaaaacttgcggagctgtggtcaaaaggatttgagatagactggacgcggctgtatcgggaggagaaaccgcgcaggatgagtctgccgacgtacccttttgcaaaggaacgatattggataccggagcccgatcatcccgtcacttccgtaaatacagaaagcaggcttcacccgctgcttcaccgcaatacatcagatttgctagaacaaaaattcagtacgatactgaacggagatgaattcttcttagccgatcatatcgtccgaaacaagcgtgttctccccggggcggcttatcttgaaatggcgagagccgcagctgaactggctgccgcgccgttagccgctggatacacggctaaaaccggcatttcgctgcggtatatcagctggatacgccaggccgttcataaaaaagagccgctgcgtatgacgacagggctttctttggaggataacggcaatgtttcatttcaagtgtacagcaatgaaaatgattcagacatttattgtgaaggaagcgctgtgattgagccgctgtctgaggcgccggttttgcatattgaacagctgaaagcgcgatgccgcaaaaaagtgctgtcaaaagaagactgttatgcggcgtttgcaaaggcggaaattgtatacggaccttcacatcaaggaattgatcacatttattgcggggaaaaagaagccttggctaaattggtgctccctgcttccgtttctgatgaggctgaacagtttgtgctccatcctagtctgatagattctgcttttcaggcggccatcggcgttatgaatgaagatcaagcgggttatccggagcagccgttaatgccttttgaattgcatgaactgaccgtttttcatccgtgcagtccaaacatgtgggcggccgtatttgtgacgcatgaaacaccggccgtacgaagaatggacattgatatatgtgatgagcgcggcaatgtgtgtgtaaggataaaaggattttctgcccggatggccgaaagtgcgccggccgtaaccgataataagcaatacgatctcccgggtaaccttaccggagccgtcaaactgatgcaggtatgggacgcggaaccgatagacaaccaaaccggcttccccatttctgaagcaaaagctgtcatcataggcggtacagacgggcaggcggacgcggttttacgattgtttcctaaagctgtgagatttgatatcggccaaagtgcttccgttgaagtgatatctgatcggctccgccgtctcggtgagattcagcatatgatctggtttgcccctcagccggctgattctcacagccatgatcaaaaaagcggggtgctgcaaattttcagagcggccaaagctcttatcggtctcgggtatggaaaagagcagctagggatgacggtgattacgcaccaagcacagcctatcacccaatatgatgaggtgcgtcccgctcattccggtgtgcacggttttgtcgggtctctcgctaaagaacatccgagctggcacatccgtctggccgatcttgaagacgggggggatttccccgcagaagacatattcagcctgccccgcgaccgtacgggtaaagcatgggtgcgcagacatcaggaatggtaccggcctcaattgcttccggtccaaagcgggccgtctgaaagtgttccttaccgctatggaggcgtatatgtcatcatcggcggtgcgggaggcatcggcgaggtttggacagattatatggtgacgacgtataaagcccgagtcgtctggatcgggaggcggccgctggacagccggatacgccaaaaaatagaccggtactggtcatcaggcccggctcccgaatatatagccgcagatgcttctgattttccatcgcttcagcgcgcctatgaacagattaaaaacacatacggcaccatcagcggcgtcgttcattcagcgatggtatttgcgaatgaaagcgtaaaagatatggaagaatcacagtttcacgccggccttgcggcgaaagtggatatttccgtcaacattgccgaagtatttgcgaaagagtctttggactttattctctttttctcttcggttatttcatatattaagaatccgaatcaaagccattatgcggcgggatgcgcatttaaagacgcatttgcccatgagctttccggacggctgtcatgccgggtcaaagtgatgaactggggttattgggagcgggctgacaatcacatttctgaagagtttgacagactgagtgcaatcggtctcgggctgatcagccgggcggaagggatgcaggcgctggaaactctgctgacgcagccgatctcccgcatggggctgatgaagctgaccaagccgattccgatcgagggaatgaaccctcatgaatttgtgactatctgattgcctgtcaaaatgacggagcaaatttaattttcttaggaggataaggttttgggtaagggagacaaacaaaaagaccgtacacagttatccttaagagcagaaataagcaatcaaatgaaagaattgaatcggcttttgctgcaagtgctgcgggtgacgctgcgttcaatgggtctgaccggcgaagcgccggcggcttcctgtctgcctttatatgaacgctggctggaagaaagcatccgtcttttagacagcgattttaaaagcggtgaaacggccgcggtttgggaagagtggcataagaagaaaaacgaatggctgaaagatccggatatgaaagcgcaggttctgctggcggataccgtcattcaagctttgcctgacattttaacaggcaaaataaaagccactgacgtgatgtttcccgattcttcaatggagcttgttgaaggaatctataagcataatattctcgctgattattacaacgatgtgctggcaaatgaagcgtgtatgtatgtggaaaatgtaatgaaaaacaatcctgaggcaaacatccgtctgctggagatcggagcgggcaccggcggaacgagcagtacactgtttaaaaagctccgcccctatcaaaaccatattcaggaatactgttataccgacttgtcaaaagcttttttaatgcatgccgaaaaggaatacggcgcggacaatccgtatttgacgtatcagctgtttaatgtggagcagcctgcggcgggccagggattacatctgcgaacctacgatatcgctattgccgcaaacgtgctgcatgccaccaaaaatatccggaaaaccttacggacggcaaaagccgtattgaaaaaggacggtttgctgctcgttaatgaactgggcgggcatacgccgtttacacatgttacattcggcttattagagggctggtggctgtacgaagacgaggcgctgcggattccggggtgtcccggtctttatccggaaacatggaaatccgttttaatggctgaaggttttcattccattcaatttccggctgaaaacgaacgtctgcacacccagcagattatcacggcgaaaagcaacggagtcatcaggcagagcagggaagcttacaccgcgcaaaagcgccaatcaaacgtaccgcaaacatcctctgatcgtcagctccccatcaaacaagcgggagaggggctttcggaaaagacagcggcttttctgataaaggctgcggcaaaagtattaaaaatgccggcagaagagataaatccgctggcttctctggatgaatacggcattgactctattctgatcgttcagctgacgaatgagctgcgggatctcgtccctgatatcagtagcacgctgttttttgaataccggacgataggagagcttgccgcattcttggctgaaacgaaggagcgcgaactgcatgcgcaattttctgaagaagtccgtcatactgaagcggcatcatccggctctttgcttgaaaaaagcacagagtacctgaaacagatcgtcagcgccatcttaaagatgccgattgaggacgttcaagcccatacgccccttgaagaatacggaatcgattccatcttaatcgtacagctgaccaaccgcgtgcgggaagacgtccctgatatcagcagcactttgttcttcgagtatccgacaatcggcgaattagcggactatctcgtcagctcaagacaggaagatatggctgggattttaagaacaaataaagaagccgaaaaggcgccgcacactttacagaaaaagcaaagccgtaaacaaagcgccggattgacgaagcgccaagcggcatctttttctgaaaaagcgccgcccgcttccgaaccgccgtcaaaacactttgaagtggcaattgtcggtcttgccggacggtatcccggagctgaaaatgttaatgagttctgggaacggttaaagaccggtgaacacggaatcaccgaaattccgaaagaccgctgggattggcgggactactatgatgagacaaaaggtaaggaaggccggatgtatacaaagtggggcggctttttaacagatattgataaatttgatccgctgttttttaaaatctccccgaaagaagcggagcgcatggacccgcaggagagactgtttctggaaaccgcttatgcggccctggaggatgccggatatacccctgattcactatgcgccggtaaaaaggttggtgtctttgcgggtgttatgaacggcaactatccgacaggggcccactaccactttatcccgaaccgcgtatcctatgtgtttgattttcacggtccgagcatcgcggtcgataccgcatgctcctcatccttaaccgccattcatctcgccgcagaaagcatcagaacaggtgcatctgaatgcgcgattgccggcggcgtaaacctgattacagatccggttcattatatcggactttcttctatgagaatgctgtcaccgtcaaacgcgtgcaaagcgttcggtgataaggctgacgggtttgttgacggagagggcgtcggctgtatcgtgttaaagccgttgaaaaaggctgttgaagatcatgatcatatatacggtgtcattaaaggaagcgctctgaacgccggcggcaaaacgaacgggttcaccgttccgaatccgaaagcacaaggagaagtgatcgcagacgcgatggagcgggcagggattgacccgagagcaatcagctatctggaagcccacggcaccggcacttccttgggagatccgattgaaatcgcagggttaaccaaggctttccgccgctatacggatgcaaagcaattttgttccatcggttctgttaaatccaatatcggacacctggaaagtgcggcgggcattgctgcggtcaccaaaattcttcttcagatgaaacacggatatctggtgccgtcgctgcattcaaagcagctgaacccggaaattgattttgaaacttctccttttatcgtgcagcaggaaacggcggaatggagacggccggtcatagaatctgaaggagtaacacgggaatatccgagaatcgcgggtacatcttctttcggagcgggcggtgcaaatgcccacctgctgatagaagagtatgaaccggctgaaatgacttcggcagacaccggccgtccggcgctttttgttttatcggcaaaagataaagaccgcttgcgcgagcgggctctgttgctgtcggatgccgccggacacggaacaattacagatgcgaatctgcttgacgcggcatttacccttcaagtcggcagggtcccgatggaagaacggctggcgatgacagcggactctgtttctgaattggaacagaagctgattgcttttctgaataattccggttctgtaagcggggtgtttacgggccggagtgatagtgctgtcacggagacgggaggcacagtcagtgaatggatggaaaaacgtcaatttgacagtcttttgaatgcctgggttcacggggcgcccgtcgattgggcatctttatataaaggcgcgctgccgcatcgtatcagtctgccgtcttatccatttgcaaaagaaagctactggatgaagcgggaagaaccaaaaacaggaacaactgaatatgtgcatcctttcctgcatgaaaatacgtcaaccttggcggagcaaagctatcatacatcttttacaggccgggaacacgttttccaggatgtgagcggggagcgggttttgtcggcagccgtttatttagaaatggcgcttgcggcttttcatcatgcggcagacagctctgaagaaaaagagatatggatccgaacggcggcatggactgacccgattaccggcggacatcacggtgcgggcatcaatctctcccttctgtctgaagacgaggaaggcatccattatgaaatatacagtgacgaagagaagctgcatcattatggaatcatcggacaagggaacatacagccatcccgcgtgcttgatattgcctccttacaaaaagactgccgcccgctgtcattcgattatgaaacaccaggcacatcaggtgtaacgatcagtaaggagttccgcaccgttgaaaagctttatgcgggagaaagtgcggtttgggcgaagcttgctctcacagatgaaagcggctgtaatccgggatatcatctgccgccggaatttctggacgcagcttttcatgtcctggccaaaacggagccgtcagtccatatcgtgcctgaagcggttgaagaactgcgcgtcatgcgtccgtgctcatccggcatgtggatgtatattaataaaaagaatcaaaccggctgtgacattcaattttgtgacgaaaccggcactgtctgcgcagaaatcaaagggataagaatgagacagccgtctcagcaggatcacgggcaagaggaacaatccgagatgatgatatttgaagaaatgtggaagcagcagcctctgaagaaatctattcatgaagagctgaaaacggtcatctgttttcttacgggagaagctgccagaaagcatgcttatcagtctttacaaaccctttatccgggagccggcgtgttttttatttcacagggtgaggaaactcaaaagctttcaaacacgcattatcaaattaaaatcactgacggacaagcatatcaagaaacgtttcggcatattgaaacggctgcaggcaaagcggatgccgttttatatggatggccgcttgaagatgaaaaggccgtgaaagactattccgttctgtatcatgtgatccgcgcagctgcttctttgcgttctaaaccgaggcggatccttctttccgctcagtgcgggagcgataccgatatcagttacgccgagtcatggatcgggctggaacggtcgctgaaactgatcttgccggagacggatacggccgcggtttattttgaacaaaaaggaccgttagaaaaactgatccataacgtatgtgaagaacttcacagcgagtcgttcggcagtgtcatgtacagtgaggaaatccgccacgtcatggaaatgaagcagacggatatcgcccctgttgagaagcgtgtgataaagagcggaaaaacgtacttgattaccggcggatgcgggggattaggcttgttatttgccggatatttcgctgaaaaaggaccggttacgctcattttgacggggagatcagcggcagccggcccggtgctgaacaagataaagagattggaagaatcaggcgccaaggtgttttacgtgcaggcggatgccgcagatcaggcccagatggagaaaggtttgcaagaagtgaaagagaaaggatgcgggccgattcacggtgtcattcacgctgcaggtcttcaaggcactgaaagcattctggagaaagatctgcaaacctttcagcaagtcttatcgccaaaagcggacggcaccgcggtgttagatcaggttctgtcacgggagccgcttgacttcttctgttgtttctcttcttcttcagcgattttaggagacttcggttcttgtgactacgcgatggggaaccgcttccaaatggcttttgtccgtcatcgggataaacttgtgagcctcggactcagaagcggcaagtcacttgcaatcaattggccgctttggaaagaaggggggatgcatgtcggcacggcggaaagcaccgatatgtatttaaaatcaagcggacagcgttatttatacactgaggaaggactcgaagcttttgaaacattgttagtccagccgtccagccagtatctcgtcctggccggttttccgtcgagggccaaacgcttcctgcagatagatcaaggcgaacggccgatttcgggttctgtaaacaggaacgtcccgttttcaggaaggcggagtgaaatgaaaggctttacactggaagaatgcgtaagctgggatgtgaaagaactggcggcggggcttttgaaaatagacaagaacagactgacggacgctgacaatctggctgatttcggctttgattctatcagtttggcggaattcgcctcttctttgtccgcccattacggaattgaagtgacaccggccctgtttttcggacattccacactggagaaggtcgtccgctattttctgacggaacacaagtccgtcatggagcatgtctatgaagaaaagaaacctgaatccgcagatcaatctgtctttgaaaaggcaggaacggaaaagcgaaagaagcagaggggaagaaataagctgaacgccggaaccgagggcagtcaggcagctgattccattgccattatcggcatgagcggccgatttcctcaggcgcgcacggcggacgagctgtgggacattctgtttcaggaaaaggatgttgtcgcaccggtcgcaaaaaaaggcttcacaagttcaaaatggaaactcggcgctgtaccgggggcggacgaattcgaccctttattttttgaaatatcgccgagggaagctgaaacgatggatccgaaacagcggctgcttcttcaggaagcgtggagggcccttgaggacgccggctacggcgccagtcacatcaggcagcagacgatcggtatgtttgtgggggcggaagaaggagattatcaccttttaacacgggacaaaggcaatgtcacgtctcatcataacggtattttggcggcacggctggcttatcacttgaatttatcaggtcctgtgatggcgataaatacagcatgttcttcggggctcgtttctgtccatcaggcggtattaagcctgcagaataaagagtgcacaacagctgttgcggccggggtgaatatcatgaataccccggacttttttgaaacgatagataaagccggaatgctgtcggaaaacgggaaatgcttcgcgtttgataaaagggctgacggcatggttccgggggaagcggccgcggcggttgttctgaagccgctgagagaggcggaaaaagatggtgatccgatttacggggtgattcgggcgagcggcatcaattatgatgggaaaacaaacggaattaccgctccgagcggcgtcgcgcagacccggctgcttacttctgtttatgaccggggccgtatcaaccctgaagatatcgaatatatcgtcacacacggcacaggtacaaaactcggtgatccggtggaaattaacgcgctttatgacgcattttctgcctatacaaacgaagaagctttttgcgcgctcacatcaattaaaaccaatatcggccacacgtttgccgcatcaggcattgtcagtttaatcagtcttttacaggcgttctcccgtgagatgattcccgccagtctgcattgcagcggggaaaaccgctatatcaactgggagaagagtcctttttatgtgaataaaacgggtagaccgtggccttctctgccgggtaaaaaccgaatgggggcagtcagcgcattcgggatgagcggaacaaacgcccatgtcgttatggaaagctataagcgcagcgcttcacctcatcgtgatgcccctgcatatttacttactttgtctgcaaaaacagaggaggcccttcaggaaaaaatcgaagatatgatcacttgggcggaaaatggcggactgaaagaaaatgatctggcccagctcagctatacgttgttaaaaggacggcatcactttaaccatcgcgccgccatcgtggtgcaagatgctgatgacgcagtgtatgtatggaagcaggcaaagcttaatgaacatcatccttatgtgttttcgagaaaagtaccgcagcactttgcagggcgtcagcatattcaggagcacataatagaagtgctcggcaagtgcagcgcctcatattctgaccatagaaaatatcaggagctgttatgcgtgctggcagatttttattgtcaaggttatgaaatcgaaggggacttgctttatggcggacctttgccgcgaatcggcaatctgccgggctacccgtttgccaggcagacgtattgggcgtccgatcgtcttcagggagagcttgaaagccggaattcagacgaacgtgaaaagcttcacccgctgctccatgcgaatacatcgaccttgaccgcccagcgctttacttctgttttttcagggcatgaaccgttttttaccgatcacatcgtcaatggaaaaccggtgcttccgggcgcggctgctttagaaatggcccgggccgccgttacgctggctgctgaagacttgcccggcgggaaaacgggtgtaaggctcaaacagatcgtttggctccgtccggtgacggcgctttctgaaggagtgacgcttcatgtaaagcttcagccgggagaaaacggagacatcgcttttgaagcgtatgccgaaggagaagagccgcttgtctttttccagggaaaggccgtgctcgaagagacggagtgtgctcctgttctcgatgtggaagcggttcaggcgcgctgcagcggccgtcacttgtcaaaggctgagtgctatgaagcgttcgacagcctcggcatcacctacggaccgtcgcatcaggcgcttgacgccgtctatgccggaagcggagaagttctcgcgaagctcactcttccgccgtccgcccgcgaggaaaaggatccgttcatcctgcatccgagcatgctggacgccgcccttcaggcttctatcggtctcgtgctctcagacggttccgcgtccggacggccgtttctgccgtttgccctgcaggatatgcaggtgttttctgcgtgccgggagacgatgtgggcggtgctttcctcagcggacggcgcctatcatattgagctgtgtgatgaaaacggcgcggtatgtgtccgattgacggggctcaccgcccgttttctggaagaggaaacggaggaaaaaccgctcttgcttcagccaaagtggcaggaatcaccgccagatgaaggcggcggacaagaagagtctttcagatacgtgacgctgtatggcggaatgaacgctgaggacataagcggcggcgccgtatgtgcggctgacggcgaaggtccgattgaagaccgttatgacgcctgcgcggcggagctgtcagcgatcgtcacgcgtcttatcaaagaaaaacagaagaaaaaaacgctgatccagcttcttgtccccgacaggggggaagacaatgtattggcggggctggccgcttttctgaaaacggctcaccttgaacatccgaagctgtacggccaagtcatccaagccgatccggacgagtcagcctcggcgcttcttgccaagctgaaagaaaaccgggcgcatcctgaacaagcggaaatccgttatgaagacggcaaacgtctcgtcagaaactggcgtcatctgccggcgcctcaaagcggcgccattccgtggaaagacgaaggggtctacctcctcaccgggggagcgggcggcatcggactgattgtcgctgaagaaatagcctcccgcgtcaaaaacgccgtcctcgtattaacgggaagggcggaagcgcttgataaagaccgctccgcccgcttacggcgcttggaagcgtcgggtgcccgcgtattgtatcaaccggttgacgtgacagacagggcggcggtcatcgccctcgtccgcggcatacaggaggagcacggaacactcgacgggatcattcacggcgccggcgtgatcgctgacaactacattctgaaccagacagaaaacgaacggaagaccgtcatggcgccgaaggtgaaagggcttatcaatcttgatgaagcagcgaaagatgtgcggctggactttttcatcctgttttcttccttggcgggaggtatgggaaatccggggcaggccggttatgcggcagccaacgcatttatggatgtttatgcagcccgccggaaccgtctcgtgcgggacaacgagcggagcgggcagaccctctccgtcaactggccgctttgggaagaaggaggtatgcgcgtggacaaagagaccgaacggctgatgtatgaacagaccggaatgaaagccatgcgatcggcctcaggcatccaagcgctgtacgccgcttttgcctccggagaacaccaggtcatggtggcagaaggcgacgaaaaacggattcgcagccatattttcgatctgggcgaaaaacaaagcgccgccggacaagctccggcagtggcagatgcaagagatctgaaagatcaggttcaagagaaactaaagcggcatgtatcagatctcttaaaggtaagcatgaaagatattgaggctgacagcgaactgacggaatacggatttgattcgatcattttcactgaatttacaaatctattaaatcggtcttatcagcttgagctcagcccgactatcttctttgaatttccgacattgcgcaaactgagcggccatttgatatctgaatggaaagaagcattcagcggcttagaaagagagagtttaaaaaccgctccaaaagccggaataagaaaagctgaagctccggcggccgttcatgtcaagcgggaaacgcccgtatccgtaaaaggaaaatcagaagaaaaaaccgaaccgatagccattatcggaatcagcggtatttttccgcaggcgaaagacatagatgaattctggacacgtttacaaaaaggagagcattgcatcacagaaattccccgagatcgctgggattggcgcgaatattacggcgatccggcagcggatgcaaataaaacgtcaattaaatggggcggtttcatagatggaatcgccgggtttgacccgctgtttttcgggatatctccgaaagaagctgaaatgatggatcctcagcagcgtctattaatgatgtatgtgtggaaagccattgaagacgcggggtactcagcaaaacggattgccggaacaaaaaccggtattttcaccggcacattgggaagcggatatcaaactttaatcaacaaggcgggtcttcctgtcgaggggtatacgatgaccggaatcgtgccgtccgtcgggccgaaccggatgagttattttcttgatatccacgggccgagcgagccggtagaaaccgcttgttcaagctctttagtcgccattcaccgcgcggtaaaagccattgaaacgggagattgtgatatggcggtcgcagggggcgtcaacacgatcgtcacgcctgaagggcatatcggttttcaaaaagcaggcatgctcagtgaagacgggcgctgcaaaacattttccgatcaggctgacggttatgtcagaggagagggtgccggcatgattgtcttgaaaaagctttcagaggctgagcgtgacagggatcacatctacggcctcatccgcggtacagcggaaaatcacggcggacgctcagcgtcacttaccgcgccgaatccgcaggctcagacggatgtgctgaaaagcgcttatcaaaaagccggtattcacccgtcaacgatcacttatatagaagcgcacggaaccggaacggcactcggagatccgattgagatcaatgcattgaaaaaagctttccaaacagacggggcgccgggcggatattgcgggataggctcagtcaagacaaatatcggacatttggagctcgcagcaggtattgcgggcgttatcaaagtattgatgcagctgaaacatcggacgctcgccaaaagtctgcattgcgagaacatcaatccccatatcaaattgaaggacagtccgttttacattgtgacagaaacaaaggagtgggaagcgctgcgtgatgaaaacggccgggtcctgccccgccgggcgggtgtaagctcattcggtttcggaggtgtcaatgcgcatatcgttattgaagaatacatgggcagaagtgagacggaacagcaggaaacccgtgagaaagcgtcatctctttttgttttgtcggctaaaaatgaagagcggctgaaggaaagagcgcgtctccttcgagattttatccaaaacggatcatcccgccatatcgatcttgcagatgccgcatacacactgcagaccggacgggatgcgatggaagcgaggctgggaatcattgcaggctccgcagaggaactgactgaaaaactgaacgcgtttctgttgggaaaaaacagcgaagatatcatcagcggccgtaaaaaacgcgagaataacacgatttccatgttctcagacgatgaagacgcggctgacctcgtcagcgcctggcttgagaaaaagaaatacaggaaagtgctgcggctctgggcaaacggatttgacacagattgggagcagctgtatacggacaggaaaccgcgccgcatcagcctgccctcctatccgttcagagccgaccgctattgggtgccgaaacgggagcagctgccgctttcgaatcaaaaaacagtattattgcaaaaaacatgggaaccgtgcgaggcagtgtcttcatccgagccgttcaacaacaaaatagcgctcatcgtctctgaagatacaaaagaccttgccgccgaggtgaaaaaacagctgaatgatgctgacattgtgcaggaaaatcagctcatctctttcttacaggatccgaacgcggccatctattccgggtttattgacttcaccggctgcggctcccgacaaaagcggcaggacatcagctgggtggcatcgctgcagcagctgattgaatacggccgcggacaagaaaacatgaaaatgctttatcttacaaaagggcttgaagccttcaaaaataaggctgccgtcatgcatggtattgaaaaagcggggctttatcgcatgctgcggcatgaatacagccatattctcacctgtcacgccgatattgatcctgaagggccgctggagcagacagccgcttttattaaacaagaaattgaatcagacttaacggagtctgctgtttgctgcagggacggcatgcgcttcagctatgttcttcggcagactgatcagattgaaccagaagccgtgcaaacagaccggactgcgtttccaaatgacgccgtcctgatgataaccggaggaacgcgcggactcggcgctttatgcgccaagcatttcgtttccgcatacggtgtgaagaaactgcttctgacaggcagaaaggagctgccgccgaaaaccgagtgggatcttgagcaaacagaccctgtcgtttcggaaaaaatacagcttatccggcagctggaatcacaaggcgtaaaagtgtgcgtctcagcagttgatctgacggataagcaggccgtcggacggcttataaaagaggtaacctcaacgctcggacctgtcggaggcattctgcattgcgcgggaattgcggaccgtgaaaaccctgcttttctccgtaaatccaaagacagtattgcgcgggtgctcgcgccgaaagcagacggccttcacagtctgtatgagagtgtaaaggatgatacgccggcatttttcgttctgttttcatctgtctcggcatccgtcccgattcttgcggcgggtcagagcgattatgcgatggctaattcttatatggactattttgcagaaaacaatgagagcggcatcattagcatacaatggccggcatgggatgagacgggcatgagcagggatataaaaagcgggatttatgagcaaacgggattgctgcggcactctgacgctgaaggtctcaagatgcttgattacattttaagagaaagacccggagctgtcgtgctgccggcacaagtgaaacatgattgggacgccaaagcgctggaaaatgccaagccagccgcccataaaggaatgagaacagcttccaaacctcctgaaacaaaaaaacgggaacataaccggattgatattcaatcttggctgaggtcgcttttggcaaaagagctgagtatcgatgaaacgcatatggatatcgatgtgccttttcaggaatacggaatggattctatctttctggcgcaagtgctgacaaagatcgatcaaaaactgccgtccgtttcaattgatccgactgtccttctggaacaccctaccatagaacagctcgcggattatttagccgtacattgtccggaagctttttcggcagatgcaacagttcccgcggagaaggtccctttgcagaagacgccgaaacggagcaaaaaaacggcagataaccccgggaaacggggaaaggttgcgatcatcggcatggcctgtcattttccgaaagcgggggatataaaagaattttggaagaatctccgcagcggaacggatgccgtcactgaagttccgccggacagatggagtgccggggaacactatcagccgggtgaatatcaagaaggaaaaagcatcagtaaatggggcggttttattcacgatattgatcaatttgacccggagtatttcaatatttcagaaacgctggcaccgatgatagacccgctgcaaaggcagtggctcgaagtgagcgcggaagctttggccgatgccggttatcaaaaagaggatctctggggccgccgtatcggcgtttttgccggtgcaagggcaggtgcgttccatcagaaatttcaatatttgcaaaaagacgcgattattggcgcggggcaaaattttattaccgcacacatggcgcacatttataactttacagggcccaacctggtcgtggatacggcctgctccagttcgcttacggcaattcatttggccgtgcaggctattcaaaatggagaagcggaagcggcctttgcgggcggggttgacattttgcttgatgaaaaaccttttctcacaatgagcgcggcgagaatcttatcgccaaatggccgttcaaaatctttcgatgccgatgcggacggaacaggaatcggagagggctgtggtgtgctggtgctgaagccgcttgaaaaagcgatagaagacgaagataaaatatacggcgttattgacggctctgcgattaataatgacggcagcacaatgggcgtgacgacgccgaatccccgggcgcagcaggacttgattgagcaggcggttcagtcagcggaaatcgatccggacaccatgacatacgtagagacgcacggaaccggtacattgatcggcgacccgattgaattaaagggattaaccaatgtcttgtctgcttattccgatgaaaaacaattttgcggtgtaggaagcgtcaaaagcaatatcggccacttgctgagtgcggcgggcgcggcgggaatcatcaaagttttgctggcgattgccaatgaagaactgccgccgactttgcattgccataaaccgaacccccgcttccaatttaaagattctccgctttatcctgtgcttgagctgaagcggtggaacggaaaaaaagagatactcagggccggggtcagcgcgttcggtttgggcgggaataacgcccatatcattgtcagcaacgaaggaattccgaaagagcgaaaagcggccatggaaccgaaaggcggccagacagtataccgaaaacagcggtattggcctgaaaaagcacagttgtccgaagcggaagaaaatgaggcgggcacagaagcaatgtttgaaataagcgaggtgtgatagattggcagttgccaccgatcaagtcaaaacgttcctgcagaaaatcagccatacgaattatatcgtccgggatcatcgcgttcatcaaatccgcgtcctcccgggcgtgactttaatagatatgctgtatcggctcgccgccgggtatctcggtgaacgccctatagaattaagacagattatttttaagcagcctgttgtaacatctgaagagtttgataaacacctgtatgtgacctttacgccggcgcgtgacagctggaaagttgagattactagcgaaaaagcaaaaaacggcacaccgcttggcggaaaccgggatgagaatatggaatgccagctttatttgcaagaagacacgccgcgggcaaaagaactgaatattgaagcgttcatgaaaaacgcaagccgaaaatgggacatgcatgacatttatggaattgcaagaagaagccatattgagcatggcgagtttatgaaaaatgaaggggccgtttatcagcttcaggataaagaagaattaatggagcttactctgagtgatttggctgaaggattccgggagaaatttaaggcgcatccggcttttttggatgcgtccacccttgccggctcttcctttgcattgtcggcccaaaagcagaatgacacaccttatattccttttatgatcaatcgtttttgcatgtatcagccgtttccgaaaacgatttacacttattctgcgaaaaacagccgcactgaaagcggcgtatcagatagcgaacctgatgtgtattcggccgacttcacgatttacgacagggcagggaacgtattggccgaatgtgagaaactgacagtaaaaagggtcagacaagcgaatatgattacccatctgatagacaaagagaagccgcctcagcagaacagaagcggccgtggtgagtcggaaaattctgtggccgcagaagacgtgtctgaacagcaaacgccggaacaaaacatggtgacttacataaagtcggaaatcgccaggctggtcaatcgtccggcacaggatattgatgtgcggaaaggcttttatgatatggggcttgactcggcgcatttgctgaagcttgtaaagatattagagcagacttttcaacagcagttttatccgacactgctttttgaatattcatctgtccgccgccttgcggattaccttatcaatgaagcgggctgtgtgctgaaagattcggcaaaagaacggcatacatcagacgctgacactgctgatgaggttctgttttttgaacccgcctggaaagatcatccgctggaaacggcggtgcagaacgggcaaaaacacacccgtcatctcattatcgctgccgatgcagggccccgtctcaccggtgaactcggcgcacattgcccggaagcggaagtgatagaactgaaaagggagcatgaggctgcagatgagcagtttggagcagatgccgagcgcatatttcgtatgctcaaacgggaactgacagaccatccgaaagaacatacattgattcagcttgtatgcgccgttgagaatggagcggcattgtcttccgctctcggggctatgctgaaaacggcacatctggaaaatccggctcttcgcactcaggtgatcaccttctgtgacaagaatgagagattgccaagtgagacggcggcaatgataagaacagaagcagactgctctcatgcaggctgcacagatattcggtataaaggaaatatacggcagatcagattgttcgaacgtattgagaaactggacgggcagacacagtctccttggaaacaaaacggcgtatatgtcattacaggaggcctcggcggtcttggatttctgcttgcttgtcaccttgcagaaaaagaaaaggtgaagctcgcactcatcggccgttcgccggaacagtctgagaagatcagcagactgaaagcattgggcgcagaagttctttacgttcaagcggacatcggcagcaaagccgaaacagagcgggcatttgctcagattacagaaaccttcggccggctgacgggtatttttcattgcgccggtgttttaaaagatcaatttatcatccaaaaagacagttctgacttgaagcgggtgttcctgccgaaaatcagcggcctgattcatgcggacgaagcttcacggaatgaaccgcttgagtttttcgccgtattttcctcattctcggcgttggccggaaatgcgggccaaatagattatgccgcagcgaacgcttttatggatgaatatatgaaatatcgcgattgcagagcggaaaaaggcgaacggaccggggcttctatgacgatcaactggccgctttgggaagatggcggcatgcaggttgacagcttgatgaaagagatcatgaatgatacaacaggcaccagcccgctaccggccggggaagggatggctgcacttgaatatatgctgcgtctcggcaagctgcaatccgttattttatacgggaaagagccggctgtaactgaaagcatgggccgattgggtccaaagggagacaagaacggatcttcattatccaacgcagctgtcaagagaagaagccgaaaacaagagagacatacagaagagcacgatattgcggtaatcggattggcgggaagatatccgcaggcgggaagcatcgatgaattttaccaaaatctgcgctcagggaaagactgcatcacaacaatgccgaaagacagatggaaaggttatcctttctcatatgaagcagatcagttctaccgttacggaggatttttagatcgcatagacagctttgatccgctgtttttcaatctgactccgcgccaggctgaaatgatggacccgcaggcgcggctgtttttagagacggcttgggaagcttgtgaagatgccggtttttatcaagacagaacggcgcgcgggccatcttcacaaaaaagaaaacgcgtcggggtattcgcaggtgtgttttggagccattatgagctgttcggcgctgaaatcacacagcggggcacaccgctgtctatgggcgtgacgcctgcctctgttccgaatatcgtgtctcactgcctgaactttacagggccgtcaatggctgttgatacgatgtgctcttcttcgctcacatccatacatttggcatgtgaaagcattaaaaggggggagtgcgaattcgcccttgccggcggtgtgaatgcggtcacacacccgcataaatatgcgtttttggcgaatgccggatttctgtcttcagaaggcgtctgcaaaagcttcgccgacggcggtgacggttatgtgccgggagaaggcgtcggcgcggtgttactgacaaccgttcaagaagcggaaagaatgggctgtccgatatatggcgtcataaaaggctccgctttaaaccatgtcggaaaaacatccggtttgaccgtgcctgatccggcatcacaggcggaagtcattacagattcttttcagggtgccggcattgatccggagacactgagctatattgaagcccacggaacaggcacgtctctgggtgatccgattgaaattgaagggctgagccgcgctttccgcaaatggacaaacaagaagcggttttgcgccatcggctctgccaaatcaaatatcggccatttagaaggagcagccgggatcgccggattaacaaaggtgcttttgcagctgaagcatggagaaatctttccgtcattgcacacggacacgctgaatccccatattccgtttccggacacgccgttttatgtggcggaccggctggaagaatgggaacggccgtcacatcctgaccagccgagaagagcgggtttaagttcttttggcgcaagcgggagcaatgcccattttgtcatagaagaatatctgccgccgcaggctgaaaagaaaccggtgagtatacgggaagacgagcctgttctgtttctgctttcggcaaaaaatgaagaacggctattggaatatgtcaaacggtatgaccgctttttacgggaaaaagaagtcaaccttaaagacctggcctacacgcttcaagctggcagagaagcgatgcctgaacggctggcatttatcgttacatccgtttgcggcctgcaagcgaaactgaaggatgtgcttgaacggaaaacagaaattgaagggtgtttccgcggacatgctcaaaatgatatttcatcaagtggaatggccgagctgctgaaaaacaagcaatattccagattgctcactgagtgggcaaaaggagccgccgttgactggagcctgttatatgaaggagagaaggcgaaacgggtcagccttcctgtatatccgttcgcgaaggagcggtattgggtgcctgtgcctgcggatatccagaaacagacagacgaaccggcggaaaaccaaaagatcattcttcaaaaagactggaagcagcaagatccggcggagtctgaagcattatcaggaacagtaatgatacttgcaactgataagacgagccgattggccgatgctctttttaaaggaaacggccatattgaaacgatctgcttcatccatcaggcaaaagacggcgccgattattacgccgccgcatcggggcgaaacctttacggcagagtgcgggagtctcttcaaaacaaacagatactcggggtcgtcgacataaccgcatatgacgcggaatatgaacggcaggaagagatagaacacggaaagcttgcctttttacagcaggctcttgaatcattccgtcatagcggcgctgtgttcagccaagtgacacaccgcctccagcctttcaaggaaagtaaacctctgatgcaaggggcgaaaacggcggggctgtaccggatgctgggcgctgagtatgccaacattcattcttttacgatagatagcgattgtgcgattgagcatacagaagaattaagcagacagattgagactgaatttttacagccgcgggccaaaagcggcagtgaatgctgctacaggctgaatcgccgttatgtgccgtttctaaagcagggtatgaatgtttcggcggcgcctgagctttcctattcgtctgatgatgtgctgttaataacgggcggatcgcgcggaatcggcgcaattgcggcggagcatgccgtttcacgcggctgcaggaaactggtcatcatgggtcgggagccgcttcctgattcctcagagtgggcagacatgaaaaaggacggcattctcccggaaaaagccgagcggatgcagaggttagccgagcggggcgcggagatccgttattacagcgtttctcttacggatcaaaaggggctccggaacatgacggacggcatccgcggcacgatggggccgattaccggcgtttttcattgtgcgggtgcaatgggagaacaccccgctttttataacaaaaccgaaactgaaatcgaaagcgtttgcacgccgaaagtaacagggcttcgcggtctctttgaagccgttcagaatgagccgctgtcgttttttattttgttctcatccgtttcgagcctgatcccttcgcttgctgcggggcaaagtgactacgcgatggctaattcatttatggactcttttgcaaatcatcaagcaggtaaaggaaacgtgtttgttaaagccgttcaatggcccgtctggaaagaaaccggcatggctgaaggcctgccggaaacacctgcttatcaaaaatcaggactttccaggctgtctgccgaagacggactgaagtttttagattacatcattttaaacggacaaagctgcggaattccttgtgttcccgaagacagtgaggctgattttggtgatcttctgaaggtgaagaaatctgaagctcccatgaaaaaaagcactgccggtgaccaaaaggtgaaggatatgattcgtcaatgggtgcgcaccgttttcagcgaagaactgaaaatgacggatgagcagataaaagatgatatgccgtttgatgaatacgggattgactcaatactctttgcggaattggttcaatcattgcaaaaacggatcagcataaagttaacaccgtccttaatgcttcaatatcaaacgattacagaaatggttgactatttcgcagtgcatcatgaagccgattttgtgacaaaagaaaatggtttcgttcaagacagggacgtagagcctgatttaatcgctgacgctgaagagagaacattcatggagccgaaagcggatactgaagacgatattgccgtcgtcggcatgtcctgccgttttccgggggcgggcggaacggatgctttttgggagctgctgatgaagggaaacaccgccatccggcctgtccccgcaacgcgctggcatgcaacagcaaatgcaaaggattatgcggggtggattgatgatatcgacatgtttgatgcgggctttttcggcatctctgaaaaagacgcggcaattatggacccgcaggcgcggatcatattagaagaagcggttcattccgtttatgatgccgggtacggccaaaaggatttatcgggccggaaagtcggcgtgtacatcggcggcagggcgcagccttcagccggtatggaacatattttgcaggcgcctaacccgattttgggggcggggcaaaactatttggcggccaacatttcacgatttttgaatgtcacagggccgagccttgtcgtggatacagcatgttcttcagggctgatcgggctgtcctttgcaaaagacgcccttttggccggaaggattgacgcggccttagtcggttcggtgagtctgctcttatctccgtccgcgcaccggttattcggagcgcgccatattttaaatgagaacggcgtgtttcatatattcgaccgtgaatcagcgggagaagtgctcggagaaggagcgggggcggtttttatcaaacgattgagcgatgcggtgcgggacggagaccgtatttacggcgtcataaaagccgtctcggtaaacaatgacggccggacgctcggtcccggttcaccgaatataagagcgcagagagacgccattcaaactgcgcttgacatggcggaaaagtcgcccgaagacattggatatatagaagtgaacggaggcggttccccaatcgttgattcggtggaaatcaaggcgctctcagatgtctatcagctgaaccggaaaacgcttctgccctgccggatcggatcggtgaaaccgaatgtggggcatttgcttctgtcttcaggtcttgcgggcttcatccgatgtgtgctgagcgtctatcataagcggattccgcctttcttatcagcgcgtgagccatttgaacattatgactttgaagcgtcgcgtattcattttaatcgtgaacccgttgattggcattcagagaagaaaccccgcgtcgcagctcagagttcatttcctgacggcgggacaaatgctcatatcctcgttgaagaatacagaggtgaaaggcagcgggaacatcaccgggcgcctcagccgccggaattcagaaaaaaacactacccgcttttgggcggctggaacagcacggagaatgaagcggaaaaaacaagtaatgaaaaaacagacattgcggatcttttaaagaaatatgagaaaaaagcagagacaagcactgcacctgcagactcgttttggcaggtgacaacgtgacgtttttaaaaggggacgaaccatgaaaaaaacagtgaatctgcgcctgacggcagaacatcccattatgaaaaaccatcttgttcacggagaatctgtcatgcccggtctggcctatattgatatgctgtatcagctggcaaagcaaagccttgatctttcattccgttccatctgtctgaaacgggtgaccatttatcatcctttatcagtgaaacggtcagagcggcttgatgtgagtgtcatattcagtaaagaaaaggagttctggactgcctcgatttgcggggcggattccgggacggttttcttatcagcggaggtgcatgaaggggttttctcatcagataagcgccttgacgcggaagagaaaaaacaagttgcgcttccatcagtctccttgcatacggtttacgaagacgcgagaagccgcggactgtcgcatgacgggctgatgaagccggagggagagatctatgcaaatgaagaggaatgtttccttgatattcggcagtctgattcatgccaggaaaatctccccggcgctctctttcatcccgcgctgatggacggtgccgccatggcctccggcgtattgcagacagctgcaggcgccggtttgtttttaccgatttattatgattcgtttagtgccgctgaaaccgttacggagcgctgttacgcggtgatttcgaaaaaatccggcatgccttctgaaatggtgaaaatggatattgacttttacaacctcagcggtgcgcatattgcttcactgctcggcctgacagccaaaaaggtgcggacagaccggcagctgataccaggcgttcagcagatggaggaaaccttataccgcattttctcaacatacgtaggccgtcctgtcacaagaaatgatgcgcacaccgtattttttgaattaggccttgaatcgtcacagcttctggccattattaaagacatcgaaggggcgtttgatctgcggctgaatccgactcttttatttgagtgcagcagcatatccgaactgcttgaagacataaaaacaaaaggaacagaagaatcttccggccttgtcgcggatgcagcaccggtctctgaaacgcaatcagtcagtcagacatttactttctatgaacatgaagcattccttcaggatcatctggttttcggcaaaccggcactgatgggtgtagtgtatccgtgtctggtgcttgaagcgtccggagcgtctcattccggcacgtatcccgccgagctgaaagatatccgctttacgggcgggcccgtcacgctggagccgggagaggccgcacagattgacatttcatttgcggcagaaaagaatgccgaacgctttaccgcaagctgcactgtttccggtaaagaaagccggaagacgtgtgccgaaggagaaataagcagaggtatagagacacccgtaaaaaaatcgtatgacgttgaacaaatgaaggcgcatgcacaaaaggtagcaccggatgttatttcccgtctgtacgattcggttgccggcttcacgataggcccgatgctgaaaacggtaacggcgggatacaaaatgagtgagagctcctttttattgcagctggacttatcaggaaaaaaagaaaaaggcgatctgcgtcactttgcatttgacccgcttatattgaattcttgttatatgtcgctcggtgaagaagaattgcagctgaaaaagcggattcacgtcccgctcatgattgagaggctgacgctttacggaccagtcatgtctgataccgcctatgtggtgaatacaatcaaacataaaaaagacgggtttctctcatttgatgccgcagtcctcagtcataccggggaacagctggcggaattgaaaaacgcgtctgtgaaagaagtgcttcagccaaatcggcttgaaaatgcgtcttttgccccgtccgggaatcaaagccgtcagaaaacgaaaggaaaaccgctggatattgccattgtcgggatttccggcaagtatccgcaggccgatgatatcaatgcgttttgggaaaatctcaaacaaggaaaggattgtattaccgaaattccgaaagaccgctggaaatgggaacattacttttccgaggaccggacggcgccgggagcgatctacagcaaatggggcggattcattgacgggatcgccgattttgatcctgagttctttaagatttccccccgtgaagcggaacaccttgatcctcaggaacggctgtttttaatgcatgcgtggatggccatggaggatgcgggatatacgaggatatcacctgaactgggccgtcaggtaggtgtgtatgccggtgtcatgtatcaggaatacccgctattcgcggctgaagcgggagtgaaaggacggcatatcgggctccccggcgggatttcatccattgctaaccgtgtctcctatttttgtgattttcaagggccgagcatttcggtcgatacgatgtgttcgggttcgctgacttcattgtacatggcgtgccgggatctgcgggatcatcggattcgcgcggcgcttgccggcggagtgaatctcaccgttcatcctaacaagtacttcatgctgagccaggggcagttcatctcatctaaaggacactgcgggagtttcggcgccgggggtgacggctatattccgtcagaaggggtcggggtgctgcttcttaaacgtttagaagacgccgtacaagacggagatcggatttacggcgtcattaagggagctgccattaatcacggcggaagagcgagcggttacaccgtaccgaaccccaaggcgcaaagcgaagtcatttctcaagctttacaggaggcgggggtatctccgggccagatcagctatgtggaagcgcacgggacagggacgaaattaggcgatccgattgaaatccgggctttaaccgatgcattcggtgatgttcctgaaacatgtctcatcgggtctgtcaaatcaaatatcggacatggggaatctgcagcgggcatcgccgctgtcacaaaagtgctgctgcagatgaagcacaaacaaatcgccccatctttgcatgcggatgttttaaatccgaatatccaatttgacgaagggccgttttccgtctgccgggaattaacagattggaaacggatttcagcagacggagcagaacagccgctcagggcgggggtcagcagctttggggcgggcggttctaacgcgcatatcattattgaagaatatgaggctcctgtcaaacaagcaatcagcagccaagagccggctgtcattctgctgtctgcgaaaaatggggagcgtctgacagaatacgcggagcgccttcttgcttttcttcaaaagaagcatacggataagccggacttatttgatgtcgcatacactttacaagcggggcgggaagcgatggatgagcggctggctttcattgcggactctcttaaggagctggaggacaagctcagatcgtacttggaaaatgaaaacgcaccgcatctttacagggggcgggcgaagcgaaatcatgagacagtggctgtgtttgaatctgatgaagatttgcaagaagccatggtcaaatggctgaaaaagagaaagtacggtcatttgctgaacatgtgggtgcagggagtcgatgtggactggaacttgttatattcgggacaaaaaccccggagaatcagccttcccgcctatccgtttgcaaaggtcagatgctggattcaagatgaagccgaggcggtttcaaaacggaatgacggcaaaacggtgatccatccgctgcttcatgaaaacacatccgatctgtgggagctgaaattcacctctgtttttaccggacgggaattctttttcactgaccacacagtcaatggggagaaggtgctcccgggagccgccgtgatcgaaatggccagggcggccgttgagcgtgccgcatacgctgtgccggacggacgtaaaggaatgtatttgaaagatctcatatggatgaggcctgtcgttcataaggggacggatgtagaagtccatatcagccttatccttaagggaaatgaagacattgaatttacgatttacagcctatcggaagaacccgggggagaacggattatatacagtaaaggcaccgcggtatcaggagagatagcagcggttccgtcagttcacttagagggctggctgtccggctgcagccaatcggttatgacgtctgatgaggtttatcaggctttccggcatgcgggtatgatatacgggccgagccatcaaggaattgatcagctgatgatcggagagaggggtgctgcagcccggctgtcgctgccggaatcggcagacagtaccgccgatcagtttgtcatccacccgagtcttttggatgccgcgtttcaggcgtcactgggtgccggttcagatactgccggagacactccgatgctgccgttttccctgcggcaggcagaaatatttcagccgactcagaaaacgatgtgggcgcttgtccgcaaacagagcgatcggtcagataacggagcgctgacgctggatattgatttatgtgatgaaaacggcgctgtttgtatgagattgacaggcttctcctgccgggctgtccggcagacaaaccaaaccgaaagcaaacggcaggaagttcagacggcgatgcttgcccctgtttgggacaaaactttcttttctctggaagaaaatcgagcggttgatcaggaacaattgctgatcatcggaaagccgggaaataccataaaggctgcggcaaaaatgtggccccgcgcccatctggcggagacgccggatcattcaagcgagcaaacattacgtgaattgacagccgggtatcaggatatccgccatttcttatggattgcgccggatcgtttcgcacccgcatccgtcagtcaggaaatgcttgatgagcaggagaatggggtgattcaatgtttccgtttcatcaaagcgctgctgtcactcgggtatggaaaccgaaacatcagctttacggcggtgacccggcagacacagtccgtgtatccgggtgatctgccgcagcctgagcatgcaggcgtacacggtttgatcggttcattggcaaaagaatatccgaactgggacatcaggctgattgatgcagaagaaggcagtgattcgtctgagatgaaaaacatctggcgccttcctccagatccggacggaaatgctgccgcgtaccgtaacggagcttggcacaagcaaaaaacagtccgggtgctgacaagttccgctccgcgtatgtcgtacagagaaggcggcgtttatgctgtcatcggcggagcgggcggcatcggagaagcatggagcaaatacatgatcacccgttacaaggcacggatgatatggatcggcaggcggccgaaggatcaggagattcagagcaaaatagacaggctggcgctatcaggccccgcgccgcattatatacaggctgatgctcaagatgccgcagcgcttaaagcggccgtccgttccgtaagagagcaatacggcaatataacgggagtcatccattccgcgataacgcttgccgacaaaagtatagcgaatatggatgaagcttctttcagaaacgcttattcagctaaggtgaatacgagcgtccgaatgatcgaagcttttaaggaagaaccgcttgattttgtgctgtttttctcatccgtaaattctttcacaaaaaatgccgggcaaagcaactatgcggcagggtgtacatttcaagacgcctttgcccgccatatcgcttccttgcttgattgtgaagtgaaagtcatgaattggggatattggggcagtctgggtgttgtatcagacccgtcttacagaaaacggatggaggcgtcagggatcggttctattgaacccgatgaagcaatggaggcgctggaagtcttactatcagaaccgttcagccaagcggcattcatcaaagctgctccgcacggcttagccgcgctgacggatcaagatgcaatatcggttgtatccggcccgaagccttcatttatggaaagcgtcaagcggcaaaatccggatcggaatgaacggcttgagactttaaaacgagaaatggagttgcgcatatgaacagccttctttgcaaactgctcttttaccaattacagtcaatcggttttttcagcgagcctgtcactacacctgcagcatccatgcggagcgccggcgtgatcggcacatacggcagatggctggaagaaagcttgaatctattaaaagaaaacggatatatcgcgtatgacggatacacggtcactcttctcacggatcagcgcccggacggccgcacagtctggaatgagtggaatacccataaacgcctgcttcccaatggggagcttgcgcaagctgaattggccgaggcgacgataaaagcgatgccttccattttaaaaggagaacgtccggctacggatatcgtatttcccgattcatcaatgcggctcgttgaaggtgtttataagcataatcctgtcgcggattattttaatgaagtgttagcagattccgcggccgcttacctgaaagcctatcttacagaacaccccgatgcccgcatcaggctgatagaagtaggggccgggacgggcggaacgagcgccatgctgtttacaaaactgaaaccatttgcaaaacagattgcggaatattgttatacggacgtttctaaagcttttttaatgcatgccgaacaggaatacggacctgatgtgccgtatttgacaacagccttgtttaatgcggaggagccttgcgaatcacaaaatatcaaaacgggtgtttacgatattgtcatcgccgccaatgtgcttcacgccacaaaaaatatcggtttgacactgcgccgtctgaaagcgctcctgaaatacaacgggatgattttgataaacgaaatcagcgatcgttctgtttttacccatttaaccttcgggctgcttgacggctggtggtcctatgaggatgctgagcttcggattccgggaagtcccggcttatatccaaaatcgtgggagcgtgtgctgcattcggaaggatacagagcggtttgtttccctgctgaaacggctcatgatttaggccagcagattatcgcagctgagagtgacggactcgtccggatgcaagggatcagagacggcagaaagccatacgccgccccggccgaagttttccgaaagcccgcacagcctgtttcccgcagccgcgcgccagaggagcatcaagctgttaaggctgatggggaatcggtcgtttcccatgtccgctctgtcatcaaaacaagtattgccgatgtattaaaaatgaaagaagaggatattcaggaagaactgaatttctctgaatacggcattgattccattttggccgtcaatgtgattaacgagattaataagcgattgaatcttacactgcagacaacgattttatttgattactatcatgtgaaactgctgaccggttatatctcggcagaatatgaaaccatcatagcctcatctctggagaccgaaagagcgaaaatccgcccggcgcttcaggaagaacggtctgctgaaaaacctctgcagacggaaagaaaggaaaacggttatcagaaaccgaaacaagaacgtatgccgctttctttcgcaaagtccgatgactcgggaatgttccgggttgtgattgaccgtccgggcggcattgaagatctgacgattgcccgcagtgaagtgcccgagacaaaagatgacgaggttcaaatagccgtccgcgccttttctttaaacttcggagacttgctttgtgtcagagggctgtacccgacgatgccgccttatccgttcactccgggatttgaagcaagcggcgtcgtgatcaagacagggaggcatgtaacatccgtcattccaggtgatgaagtgattgtcggcatgggagaggaatttggatctcaggcgaatctcatcacatgtaaagaacatcaagtctatcataaaccggcccggctgacctttgaagaagcatgcgctcttcccaccgtagcggtgaccatgatagacgccttccggaaagccggacttaaaaaaggcgaaaaaatattaattcagaccgcgacgggaggaacggggctgatcgcggtgcaaatggcccggcatatcggcgcggaaatatatgccacggccggatcacagaaaaaaattgagtatttgcattcgctcggggtccgcaataccatttgctatttagaagaagattttgaaacggaaatcatgcgaatgaccggcggccggggggtggatgttgtcattaataccctggccggtgatgccatgcaaaaaggaatgaattgcctggcgccgggcggaagatatatcgaaattgccatgactgcgctgaaatccgctaaatcagtcgacttgtccgtccttcataacaatcaatcgtttcacagcgtggatttgcggaagctgtcccttcaaaatccggaccaggtcaaggactatcaattggaactgcagcggctggcggaagagggagtcattcagcctgtcatctcaaaaatcttttcctttgaagacataaaagaggcgtatcactgtctggatgaccgcggaaatatcgggaaaatcgtcatcagcgtttctgagccgtatcaaatgacgtaccgccccgaacaaaaggatccggccgatacagtaaaatcagcagctgtgttacatgaaaaagaaccgatcgcgattatcgggatgagcgggcggtttgctgaatcggagaatctccatgagttttgggaacacttagccgccggacgggatctgattaaaaaagcagacagatgggatgtctctgacagccaatgccagtatggcagttttatagaggacattgaatgttttgaccccgttttctttcatatatcgggacgtgaagcgacctatatggaccctcagcagcggctgtttttggaagaatcatggaaagcgcttgaagatgcgggatatgcgggagactcggtaagaggccgggaatgcggcgtgtatgccggctcctgcggcggagattaccaggccatttttaaacagcaggggcccgcgcaggctttttggggcaatcacaattccgtcactccggcaaggatcgcctatcaccttaatttacaagggccggcgatcactgttgatacagcatgttccagttcactgacagccattcatttggcatgtcaggggctctggacgaaagaaacggaaatggcggtggcgggcggggttttcattcaatccactcccgctttttatcagtcgtcaaataaggcgaatatgctgtcaccgaccggacgctgccatacgtttgatcaaagcgcggacgggttcgtgcctggtgaaggcgtgggagcggtggtgctgaaacgtcttagcgacgccgttagtgacggagatcatgtgtacggcgtcataaaaggatctgcaatgaatcaggacggcgctacaaacggaatcaccgctccaagcgcgctttctcaagaacgattggaacgtcatgtctatgatactttccacattgatccggaaaccattcaaatggtggaagctcacggaacgggcactgcactgggcgacccgatcgaattcggcgccttaacgcgcgctttccgccgctatacggataaaaaaggatattgcgccatcggctctgtgaaaaccaatctcggacatgccgctgcggccgcggggatggccggactgtttaaaatcctgctgtcgctgaagcatcggcagattccggcttccctgcattttcaccaagccaatcagcatattcaatttgcggacagcccgttttttgtgaatgaaaagctgatacagtggaaacggaatccggatgcaccgcgcagagccgctatcagttcattcggattcagcggaacaaatgcccatcttgttattgaagaggcgccgcaaaccgtgcgccggtcgccggcaaaaccggcctgcctcattcctttatctgcgcggacggagcgtcagctggaaattcaggcagaacgcctgctggattcactcagcaagaacaaagacagcgatctgggaaatataagttatacgctcctgctcggcagaaagcatttacatcaccggtttgcctgtatcgtaagcagtgcggacgaactgaagcgggtattatcggagtggcttgtaaaaagagagcttccgggtgtgtttgtgtccaatttgaaggatcagaagccggcagaagaagccggaatgaaaacattcggaatggaatgcattgaacagtgccgctcggcggcttcgcccgcgcagtacagagaaagcctggcacatatcgctgaccttttttgcagagggtatgatcttccttttacacggctttttgacggagggcaatattataaaacgccgcttcctgcctacccgtttttaaaagaaaggtattgggcggctgatgtaaatagttctttaccaggccaagccatgaaaaagtctgaaacgcaaaccgttctcccgtcttcgccgcagcctgaacatgaagggctgatttctctgactcctttaactgagatcgaaatgagagcgtttgaaccggagacattgcaaaagccaatcgtgttacagcctttggattgtactgtttctgtccagcagccagaaaaagccgtttccgaagacaatagaacattgcttgaagaattgaggacaagcctggcagatattttatttttgtcaccggaagatattgatgctgatgagcctttcatcgacatgggtcttgactccattatcggggttgaatggatacaaacagtaaataaaacgtaccacactgagattactgccaataaggtgtatgaacacccgacgcttgaagagcttgcggaatatatagcgggacaaataaagaaacccgagtatgctgaagcggaggaaacagcggtacgtccgcaaatcccggaagcagaaactccccttgccggcatctctgacggcactttgcgcaaagagctcaaagaaagccttgcggacatcctgtttctgaagccggaagatattgatgagcatgaggcattcattgagatggggctggattctattatcggtgtggaatgggttcagtccattactaagacctatcaagcgtctattacggcaaatctggtctatgaatatccgacaatcgcaacattagccgggtatctgaccggttctgtccaaaaagacaccgaggaagtacatggggaacatacgaaacaaaacgatatatcagaagagacagatgatcaagaaccgcccgagctgatctgtcttaacccaaatggaaagggaagaccgattttctggtttcattccgcgctgggggcagtggagctgtaccagcctgttgccgaacggaccgggcgtcctttttacggaattcaggcaagagggtggatgacagaccgggaaccgatccgcggcattaaaaaaatggccgaatattacgttaagctcatacgtaccgtgcagccccggggtccttacgatgtaggcggctattcattagggggcatgctcgcttatgaagtcacccggcaattgcagctggctggagaaaccgttgagtcaatcgtcatgctcgactcctttgacgcggcgggtgcgcgggaaataaacattcctgatgaattatttgataaaaatatgatgctgcagacggtgaacatggctttatttgcaccgatttatcaacatccggaacgcatttctgaaaccttgattcaccgtgatgaactagatgccgatcttcatgaagacatatttttagagcaattaatcgcaaaagccaaacagcgggggttaacgaagacggacgcgttggtgaaaaatctgatcaggcagaatataaatgttcaggacgcttacgaaatcactgattacgaactcctgccgcttccggatccgaacggggtgacatgctattatttccgaaataaaaacggtattttcttgggtgagcttgatccgtattttacaatcagggctgatattttatccgctgatttcgtcaactattggagccagtgggaagagcatatgacaaacatcgccatcatggatgtggcggtatccaatcatatgacgttattggctgaagacagcgcagccgaaacgatttctgaattttgcggcgttttatattcggcagacggaatgacagaatacagctttctgcagctgcaggaaaagatactgaacgtgcatggtgagatgctgaagcagcccgccaaaacaagaccgtaaattcacatatccgcccgccgggtttactcgtaagctttggcgggtcatttcaaatcttgaacacatcttggaggaatgaaaatgaccagtttaacaaaaatcagacagcagcagccgtacaagtggtaccaaacgatgagagaaacctctcccgttcattacaatgaaaaggaagattgctgggaaatcttcacctatgatgaagtgaagcgggtgatttctgactacagtcatttttcttccgatcataaatacttaagtgcggacaaacaggaaaaaatgatccggcatattaacaaagacagccttttgaaaatggacccgcccgaacacaccgtcttcagaaaattggtcaatcagccgttcatgccgaaatcggttgagtctcttgcaccgcgtatagccgctatcgctgatgacctgcttcaggccgtccgttcaaaagacaggatggacattattgaagattacgcatttccgcttccgattatcgtgatcgcagagcttttaggatttcctccgaaagacagggatatctttaaaagctgggtcgaccaaagccagaatgtaaaagatgaaaagaaaatgaatgaagtgcaaaagcagatgatcggatacttcatgcagtttattttacagcggagaaaacagccgcaaaatgatttaatcagccatttaatttcagctgatttagacggagagccgctgtcagacaagcaattaatcggtttttgcggcttgttgatcgtcgcggggcacgtaacgacggagaatgtgatcggaaattcatttctcagtctcaaggagtttccgcatattctgccccggctgcttgaaaataaggcgctccttcctgactttattgaggaagtcatccgcctcagaccttccattcagcgggtaacccgctacaccgcggttgagagcgagattggcggaaaaacgattccggccggagaaaaagtgtatgcgtggattggatcggcgaacagagatgaaaagaagtttgaaaatcccgatcagattgacttgggacgaaagccgaatcagcatctgtcattcggtcagggcagccattattgcttaggagcgccgctggcccggcttgaagcgaaaatcgcgctttcccacttttttgaacagatgcccgcatggcgttttactgaggatcaagagccgaatctggttccgagccctgtatttcacggcgttgacaggctgcttgttgagttttgagcgaaaaaataaaagaggcttcgcgggaagcctctttactctgggggcttggagaaatgaatgtaggaatcgaagcaatgaacgtgtttggcggaaccgcgtatgtagacgtcatggagcttgcggaacatcggaacttggataaaaaaaggtttgagaacctgctgatgaaagaaaaagtggtggcgcttccgtttgaagatccgattacgttcgccgtaaatgccgcaaaaccaattatcgactctctgtcagaagaggaacggaatcaggttgaaatggtcatcacctgtacggaatccgggattgattttggcaaatccatcagtacatacgtccatgattatttgcagctgaagcggaattgccggttatttgaggtgaaacaggcttgctattctttaacggccgggtttcaaatgggcgtgaatttcatcttatcgcaaacatcgccgggagcgaaagcgctcatcatcggaacggatatttcccgctttttagtggctgaaggcggtgacgcgttgacggaggaatggtcctatgccgaaccgagtgcgggggcgggagctgtggcgcttttagtcagcagcacccctcatgtctttttgcttgatcaaggcgcaagcgggtattacgggtatgaagtcatggatacctgccgcccgattccggatagtgaagcgggggatgctgatctgtcgctcatgtcttatttggactgctgtgaaaaatcatttcaggaataccgaaagcgtgtgagcggggcggattataagaatacatttcaatacctttcttttcatactccgtttggcggaatggtaaaaggagcgcatcggacgatgatgagaaaattggcaaaggctaagccgcaagacattgaagcggattttcagcaacgcgtgctgcctgggattcaatactgtcagcgcgtcggcaacatcatgggggccaccgtatttttatctcttgccagcacgattgataacggctcttttgaaacgccgaaacgcgtcggctgtttttcatacggttcgggctgctgctctgaattttacagcggtgtcgttatgccgcaaagccgtacgcggcagaatcaatttcagatcagccggcatttggatgaacgcgtccgtttatcgatggctgattatgaccggctgctccaagacagcggcatcgtaaaattcggcacaagaaatgccgcgcccgcagcagacatcccgaatgcgcatcaaggaaaaacgcgattggtgctgactgaaataaaagagtttcacagaaagtatgaatggacgacttaatatcagaaacactcagagccggaaaggcttgagtatttttaaagaaacggagaataaacatgaatccaatgattgatgtacaggaaacagaaccgggcattgtgcaggtcacaatgcaggatacggccgggaaaaacgggctgtcagaagagtttgtcagagagctgcaccgggtattccgagacatcaatgcccatccgtcctataaaaccgtccttctgacgggttacggaaattatttctgcacgggaggaacgcaggaggggcttttgaccattcagagcggaaagcttcaatttacagatttaaagcttcacagtcttttattggattgcaggattcccgtgatttccgtcatgcaggggcatgcgatcggagccggctttacgatcggtctgagcgcggatttcgtgattttaagcagagagagtttttattcttgtaattatatgaagtacggatttacaccgggaatgggcgcgacgtatattgtgcctgaaaaactgggaattgtcctcggggaagaaatgctgtttactgccgcgaatttcagcggcgccgctctggaaaaacggggagttccgtttgaagtgctgccgaaaaaagatgtccttcaaagaggccgcgaattggcccggctgctggcggataaaccgagagcctcactggttgcgctgaaaaccaatgtgaccgcacggatcaaaagagagctgacaaaagcggttgaggaagaggtgaacatgcacgaagccacattccatcttcctgaagtaaaagagagaatcagccgcttatacggcagttaaacagaatgaaaaaagcatgggaagccccatgctttatcactggtccgtcttttgcagaacggagcctgcgaattgttctttaatttcggcgctccgggctgcggtttctgcgatgcagtgcatgatggcttcttcaaagcggcgctcttctaatgcgcgaaggcctgcttcagtcgtgccgcccgggcttgtgatttccttgcgcaggcgttcaggccgtttgctgcttgttctgagcatttccgtcgccccggccatggtttgtaaaatcagctcttttgccgtttcttccggcaggccggcttgaagggcggccttttccattgcttcgacataccggtacacataggcgggaccgcttccggcaatggcagtgacggcatcaaggtgtttttcttcaaagcgcgtcgcttctccgatggtttccagaagctcttttgccatccggatttcagcttcactcgcctcggagcttgcggaaaaaccggtcgccgattgctgaatggccgcggatgtattcggcatcgcccggatgatggtgagctttctgccgaaatattgctgaatcgtgtgaatcgtcagccctgcgatgacagaaatcacaagctgatctttcacgtattcgcgaatgttctcaatgctttctgccgcatctttcggtttaaaggcgagaacgagaatgtcggtattgctgaaaaactcttctttatcccggcacggttttactccgtacgttttttggagctcttcaagccggctgtcatttgaccggtttgtcatatatatatgtccgggggctgtcattccgctttgcagcagtccgttcaccattgcttccgccattgatccggccccgataaaaccgattttcttcatataaatcctccttcttctcaaaacacaaaaaaaccttcccgtcaaaaaggacgaaaaggtttcgcggtaccaccttacattagcacgaatcagccgtgctcagctcaaatcccgtaacgaggggatacgtttaggttttcctaaccgctctgagggcaggttctgtaaacaagagggccgcaatgtctttcagccggggacattgctctctgctgccgttgtttatatactagttcctcgtcatcgcgttccgtgttttctagtttgttgttcattatgctatgcgcaagaacgggatgtcaatctttttttccgatatgcggcaataatgacacagtgaaaagaaaacgctaaaatatgattattcaggaatgaaaagaacgaaggagcgtaaacatggcagcgagaaagatcattccgatacgtgtgccgactccgtttgcagtcggcgacgttatcgtttatttagtaaaagatgaagccctaacccttattgattgcggcccgaatacaaaggaagcggctgaatcgctctcattgcagcttaaggaacacggggtttctgcggcggatatagaacaggtggtgctcactcatcatcacgcagatcattcaggtctgctgcaccttttttccgacgatgcggaagtgatcgggcatccgctgaatgacaggtacattactcaggatcagtcgtatatcgcccggcaggaggacttttttctgtcgcttatgactgaaatggacgttcccctgacgcctgaagacatacataaaacagttaagctgtcatacttattttctgcaaaccgtccgttaacgaaaacagtgagggaaggcggaaaaattgacgggcttaacggctggacggtgctcgaaatcccgggtcatgccgcttctcacattgcgctctaccatgaaaaaagcggtgaaatgttcagcggcgatctgcttttgtccaacagctccaccaatccgattctggaagctccagaaaaggggggcgtgcgcgcggccccgatgctcgactacttgaactcaatgaagcggctgtatgacgtaaacccgtcctttttatatccgggacacggcgatctgctgacagacgtaaagcctgcttttgacaggcggcttgaaaaacagagaaaccggtcggaatatgtgctgcgcctgttgtcagaggaaacgctgacggctttccaggtatgccggcggctgtttccggctgtgtatgaaaatgaattgtttttaacgatgtcagaaacgatcggccatcttgacgtgctggccgccgaagggaaggctgaatcctttcagtcggggaacactctgaagtttaaagctgtgaaggggtgaaggaaatgggcagattaacggataagcggatttggatcaccggagcatccggcggactcggagaacggcttgcatattcctgcgcggcagaaggggctcatgtttttttatccgccaggcgggaggaccgcttgcaggaagtgaaaaagacgattaccgcgcgcggcggacagtgtgatgtcgttccgtttgacgtccggcatgcagaagaggctgaaaacgtaaggcgtttgatcggtcatgttgacgtattaatcaacaacgccggcttcggcatttttgaaacggccgctgattcatctttggatgatatgaaggcaatgtttgaagtcaacgtcttcggattaatcgcctgtacgaaggcctgtcttcctgtgatgcttcatgcgaaaagcggccatattatcaatatcgcctcacaggccggcaaattggcgacgccgaaatcaagcctttattccgcaacgaagcacgccgtgttagggtattccaatgcgctgcggcttgagctggccggtacgggtgtagccgtgacaacggttaatcccggtccgattaaaacagacttctttacaattgcagataaagagggcggttatgtgaaaagcgtcggcagatggatgcttgatgccgaccatgtggcagagcgcattacatccgtgattctgacggataaacgggaaatgaatcttccgcgatggatgagcctcgggacgaagctgtatcagcttttcccatcgtttacagaaaaactggccggccgcgcattaaagaaaaagtaacaagggggaaaaaggaatgtccgaccgggatatacacaaggcattgatggcagagcctttagtcaggcaaatggcggaggcgcgtgaagtattttggatcaatccgcataaaaccgatgatccagtaaagcatggcgctgaatggaaaaaggagattgccgaagcggaagaaaggctgcgccggtttgcgccttatatcgcgtcggcttttccggagacggaagcggagggaggcctcattgaatctccgcttgtcttgattaatgaaatgaagaagcatctggaacacagcgccgctcaggctttccccgggcgtctgcttttgaaatgcgacgacgaacttccgatttccggttccattaaagcgcgcggcgggatttacgaagtgctgaagcatgccgaagatctcgcggtaaaagcgggaatgctctcagcagacgacgattacagcatattgactgaagaacggtttaccgcttttttctcaaaatactctatagccgtcggctctacgggcaatttaggtctgagtatcggcataatcggcgcgaagctcggcttttgtgtgaccgttcatatgtccagtgacgcaaagcagtggaaaaaggagctgctccgggaaaagggggttcgcgtcatcgaatatgaagcagactacagtctggctgtcaaagaggggcgcatgcaggcgaagcaggacccttattgttattttattgatgatgagcattcccgggatctgtttttggggtatgccgttgcgggaagccgtgtgaaaaagcagctcgaccaaatgaacataaagcctgatgcagatgaaccgcttttcgtttatttgccgtgcggggtcggaggaggcccgggcggcgtcgcgcttgcgctaaagctgatctatggcgagcatgtccatatttttttcggtgagccgacgcattcaccgtgtatgctgttaggactgttttccggcttgcatgacggaatcagcgtgcaggatatcggtcttgataatcaaacggccgccgacggactcgcggtgggaaggccgtccggactggccggccctctgatggagcctataatcagcggctgttataccgccgatgacggcacgcttttttcgctgctttatcaattaagggcggccgagaataagagccttgaaccctctgcactcgccggactggccggggccgtcaaggtcgttcagaccgaagccggaaaccgttatataaaagagcgggggcttgagatggaaaatgccgtgcaccttgtgtggagcaccggcggaagcatggttccggaggaggaaatggaagagtacagccggatcggttcctcatttttgaaaaaaatgggcagacagtgaagcggttttccgttacaatctttgtaagcgtttgtttttttatcggaaagccatacagagagattggtgtgaattgtgaaaagtaaagaattgaacttacatacattgtatacgcagcacagccgcgagtcgtgggccggattcggcggccatctttccattgccgtttcagaggaagaagccaaggcggtagaggggctgaatgactacctgtcggtggaagaagtagaaacgatctacattccgcttgtgcgccttctccatcttcatgtcacgtctgccgcaagacggaatcagcatgtcaatgtgtttctgaagcatccgcattcagcgaaaatcccgtttatcatcggaatcgcgggcagcgtcgccgtcggcaaaagcacgacggcgagaattttgcaaaagcttctttcccgtctgccggacaggccgaaggtgagcctggtgacaaccgacggtttcttgtatccgacggcggaattaaaaaggaaaaaccttctgtccagaaagggattcccggaaagctacgacgtgaaagcgctgcttgagtttctgaacgatataaagtcggggaaagagagagtggaggcgcccgtatattcccatcttacgtatgacagggaagagggcgccgtcgaggttgtcgaaggtgcggatatcgttattatcgaaggaatcaatgtcctgcagtcgccgaccttagaggacgacagggaagatccgcggatttttgtatcggatttctttgatttttcgatctatgtggatgccgaagaaagccggattttcacgtggtatttggagcgtttccgcctcttaagagaaaccgcttttcaggatccggcttcttattttcataaatttaaggatttgtctgatgcagaagcggataccatggccgcctccatttgggagagcgtcaaccgtccgaatctgtatgaaaatatcctgccgacaaaattcagatcggatttgattttgagaaaaggtgatggccataaagttgaagaggtgctggtaaggcgggtgtgatgggaggaggaagcgaatattatgatgcatcatattgagttgtatgtatctgacttgaaagcctccgcccggttttggggatggtttttaggtgagctcggttatagagaatttcaaaattgggactccggcatcagctggaaaaacgcaggattttatgttgtgcttgtacagacagaggagcgttttttaacaccggagtaccacagatgccgggtcgggctgaaccatctggcttttcatgctgcatcaagagagcaggttgacgagatgacagaaaagctgcttgccagaggatgccccgtgctttacagggaccgccatccatatgcaggcggaagcacgcattacgccgtatacacggaggacccggatcggataaaagtggagctcgttgcgcctgcttctgaatgaactataacttttcgtttttttcttcgcgcagcgcgtcgagtttcttttcgattctgtccaattgtatgcggcgcttgttcaagcttctgaatacgtatatcacggcaaacaggaaaaatgcggctgcaataaatgaaatcaattgaaaaatgacatcaccgatgttcatcttttttacctccgtgtgcggcgggtttcttcagcccgccgttttttcattttgaccgatgtgaagacatgggggatgaatcatttctctcctagctttgttttttttctgagaatgaatagtttctgcatgtggcttatgaccacttttgcggccgcatatcccggaatggccagaagcatcccggcaattcctgagaatttgccggcggcaagcagaagaaaaataatggtcagcgggtgaatgtccagcttccgtcccataatttgcggggaaatcagctggctttcaagctgctgtacaatgacgacgaccgtaatcaccagcaccgcctcggtcggtgaatcgaacaatccgacaatgactccgggaaatgtgccgatccaaggcccgataaacggaatcaggtttgtcaccatggcgaacgcgcccagaacgagcggataatcgagcccgattataaaatagccgattgtgacgagtacgccgacacaaaaactgacgagcagctgtccttgtatgtatgaactgagagcttcatccatgtcctgaaggatttgttttccttcttttttatgtttttccggaagaagccgcagcagtcgccggggggctttgtttccttcttttaacatgtaatacagcgcaaacggaataatggcggcggtgatggcggcattggcagccgtaccggccaggctgctgagagaatcagcgattgaaccggaataatttgcggctttgtctgctaattttttaaaggaatccccatgctgaagccgggaaaaccatttgctgtcctggagatgcccgatccaattttcagcttttgcggaaagctccggaatatgatctgtgaaggctgtaaactgtttttgaacggcagggcccgccgtataaaggaagaggacaaaaaggccggctgttcccgcataaatcgctaaaatcgcgattccttcgggcagctttaatttcgcatgcagcagtctgacgagcgggcggcacaaatagtaaaggacgcccgataatacaatgggcggaaacaaggttttaaccgtaatcacaacaggctggaacaaaaagtctattaatgttccgagataaatgatgagaaataacagaagaacggcatagccgatcctgaaataaggcccgacaggcatatcctgcaccacgcaatctttaaaggtttactctcggacatttcccttatcgccgggtgcataaacgtccgtgtcaggaaaactgcccttgattggtgacgtaatcgtagataatatcttctacatgggcatggagatcctcatcgggttcttcattccttctttcttctaaagctttttttaaactctgtttttcataggggctcagcggatctgtcgacacattccgtccatactggcggagggcttgtcccagcattttttctataaattgatccatcatatattctcctattcttgtcattcatctttattctactaaatatcatgtgatcctcccactcttctatcatattttctgtcagggccgggttaggatttttattccaattcagctgagagaatacgatgaaacggcagcgttaacgcatcttcatcgtttatgatttttaaacgcttttcgtcatgcctcacttgttttacccagccccaaaagcggcgggggccgtgtgcggaagcgtaggtgaccgaaatggccctgtcttcttcaatcgacgccgcaatgatgcggttcatgtcgttcagttgctcttcgctcagttccggaggccggaattcccgttcttttcgttttttcgcaagcagctgctcccgatgttcgggcagcatcatccggcttgattcccacatgacattatacccgggtgttaatttgttcggattcatgtatatcacctcaaattatttgtaatgcccgccgattttttcagcccggtgaaaggcttggccggcctctgtcagtgaagcggcatggaggagcgacgcagggccgtaccgctcatgaatatcatccaatactttgccgagactgatctttttttcctgggcatcgaacaggctcagctgaacataatcacaaggctccagctgggaaagggagacgccggcgctgcggacgggcgcaccgttccaatgctctttgaagagcttgaccgccgttttaaaaatatccattccgaaattagtcggtgacaccagctttctctgtctgtgaaaacctgaagggaattcaaaatcagcgcctctgatgctgaccgaaaccgtatggccgatgtattgtttgaaacgggcgcggcgggccacttcttcgcttaactccagcagcacgactttgatatcctcaaagcggctgtagtctctcgggagggtcatgttatggccgatcgctttttgccggctgtgcgtgttgacggtgaccggagagggatcgatgccgcgggctgtccgctgaagcaattcgccgttaatgccccagcgttttttcagcaattcggcggggtgtccggcaagcccgccgattgtgctgatgcccatccgtcttaaatgatgctccatccgttttccgatgccgaataattttccgaccggcagcggccacagatcctgcctgatatttgacatatccaatctgtggatgccggatgcgttttttttggcaaaatggtcgcaagccatttttgcgagcgccttattcggcccgatgccgacacgggcataaatgccgaattcacgcataatcgcttgctgaatgcttttggcaattgtaaaaggatcaccgaacagccgcctgcttccggtcacgtcgagaaactgctcatcgatggagtagggttctacaagatcggtataccgttcaaacagttcggtaatcatgacggatacatcaatataccgctgcatccgcggacggacaataacggcgtcgggacatttggcctgcgcttcccacagccgttcggcattttttacgccgtatcgtttggcgagcggacaagccgcaagcacgacgccgctgcgtctttcgggatctcccgagacaatcacgggccggcttttgagatgaggcgcttccgctttttccacagacgcataaaacgattgcatatctacaagaagaatatcagccataaaaaaacctccgggaacatttgttctgtttttcattgtacccgaacaatgatcacgtttatactggtaaatcattccccggctggaagacgtgctgattcgttcgcttgaaaagaaatcatttacaattgcaaacaacccacatataattttttatattccaatgagaagagctgacattcattttgccggacgaaaaggagagtcaatcgataatggatattcgaacaattacctctgaagactatgaaatggttacgtctgttttgaatgattggtggggcggcaggcagatgaaagacaaactgccgcgcttgttttttgaacattttcaggacacaagctttatcacgtacgggccggagggaatgaccggttttttaatcggttttcagtcacaatcagaccctgagacagcctacattcatttttccggtgtgcatccggatttcagaaaaatgcaaattggaaaacagctctacgatcgatttatggagacggtgaaaaaaaggggctgcacaaaagtcaattgcgtgacggcacctgtcaataaagtatcaatcgcttatcatacaaaattaggctttgaagctgaaaaaggaaccaaaaccgtaaacggaatccctgtttttgcgaattatgacggtccgggagaagaccggattctgtttgtgaaatatatgtagagggggatgaatatgggttttttagctgacacgcccaaaccgccttattatgcggtcattttttcatcaataaagggaaaatatgatgaggaatatgaacatacggcagagcgcatgatgaatttggcaggcggacagccaggctttttaggcgcggaaagcgttcgggaggaagacggctgcggcatcacggtttcctactgggacagcctggaggcgattaaaaggtggaaagatcatactgaccaccaggcggcaaaacaaaaaggaaaaagcgcctggtatgaagcgtacgcggtccgcattacgaagacggagtcacagcggatgtttgcgtcaaaaggggcggaagattgattacatttttacagcatacacaagaacagaccgcgcgggaaattgcggcggttcagcgctgcgcttatcaaaaagaagccgagctgatcggctttttcggcattcccgccttgcatgaaacacccgatgatatacagcggtcacgggagacgtttgccggttacaaggaaaaagatcagcttgcaggcgtcatttcgtatgaaaaaaagggatatgaccttgtcatatgcaggctgacggtgcacccgtccggctttcgaaaaggaatcggacgggcgcttattcaatttgtgatagatcaaaaccgggacgcccaaaaaatagaggcggctaccgccagccaaaacgttccggcagtctctctctatttaaaaacaggtttcacagaagccggacagatagagacgccggaagggctgaccctctcgttttttcatctttatccgaagaggaaagcggaagttgttccgtacaagccggaatggaaagaaatatttgaaagagagaagacggacttgatccgaatcttcggcccagcacttcattctgtcagccacatcggcagcacctctatcccggggatggcagccaaacccgtcatcgatatactggcggaggttaaagatatttcggacgctgaccgattcagtccgcagctggaagcactcggctatgaggcgaaaggggaaaacgggatagagggccggcgtttctttcaaaaaggcggcaacaagcgcacacaccacgttcacatatacgaaacaggccatccggacgtgaagcgtcatctgctgttccgggattacctcaccgcaaagcctgaaaaagcggctcaatacatggaactgaaacggcacctcgctaagacgtacccatacgatatggcaaagtatagtgaagggaaaaatgactggatcaaggcggctgaacaagaggcaaaggtctgggagagcgggctgctgtaaagaaagcagaaacaatgcatacagcggctcggtatgctacaatggcgaaaatgaaaaacggaggatcatctatgcaaatacatgtgacggatgcggcgaaacacacacttcagcaggcaatggacgccaacccggggaaaaaagcgcagctccgctatgacgcagaaggctgcgggtgcgcggtgagcggcgtgccgaccatctggctggcggacgaattaacgggacaatgcgaagccattgaaaccaacggacttccgctttacatccagacctcacaaaaagtgttttttgacgaggaaatgacaatcgattacaatgaaaaggcaaaaacgctcgtcttaaaaagcccggcagagatgctgagcccgagaatgagcatattagtaaagcagggagaaacggaaagtgaatcaaaagctgaaagccattaaacagacggcacagcataaaacgtgggtatcctttctgaacaacaaccacccgtacagtctgctgcactggtccatcggaggcgctgaatccgttcagaaggatgtctggctgcttcaggatgagatgaccttcaaagcgcaggagtttacgacaatcgacctcgccattgattggatcggagaaaatatggacgggattaccgacgttttatgacgtgaaagcgaaagaaccagcatacgttctttcgcttttttacgtttgcgtcatggtatctaaaaaggtttgaacggctttacggtagctctccggatttttggtgtacgacatggcatgcccgcccgattcggccagatagagcatcttagggccgcgttttctgcggtgcagcaattcggaagaagcgggaggtatataatcatcttccttactgtgaataaacagcacgggctgccggattcggctgataaccgataaaggcgatacatcacggatacggtatccttctctcatccgcaaaaagaaatcagccaaaggcagaagcggccacggaggcagccggaactcccgcttcagcctgtaggcgagctgatcgcgaaagcttgcgaacggacagtccgcaatataaaaatcagcgccgttttcaatcctgatgcccgcccgcgtataataaggccgtcaccgctcccatcgattccccgtggatgccgatttgaccgccgtctccggttttgtgtctcacccaattcacggcttcttccaaatcatctttttcaaaatagccgtagctcgtcgttctgccgccgctttttccgtgcccgcggtggtcatatacgagcacattccatcctaaatctaaaaataaatccatgtatttcaatgaattgaacgaatttacggtaacgccgtgacaaataatcatggtgtttgccgtatgatgcggggcgacgtaaaagcctttgatctcatacccgtggcgtgacaggatgacagcctcttctttttccatggcctgaaaggaatcaaatctatcatgcccgtccgccgtttcttttttcatgatatcttcatccgtctttttcttcataaacataatcagattcgtaaaagcgaatccggcagccaaaaagactgcgcaagccgaaccgaacaccgccagccgttttttcacacaggcaccctcctttcatatgaaaaatccttcctccggcttttcaggaccgtgaacgttgccggcctccggcgctccgtggtacacttgcttcaccatattcagatacggggggcgtcatgatgaaaaagcagctgcctaaagaaaaacacagcttaaaagacgatctggaggaagatctgaaggccaggcttttgcaaatgaaaagtgagctgaaggaagaagacgagaaaaaacaggcgcagcaaaaggcggaacaaatcagaaaacgaaaagaaaaagaaaaacataaaagctttgaagagctgctgaatgaaagcagtctcgattggcacaaatataaataaaccggcatctgaaaaggtgccggttttatgatttaagaacgatgggattcgtatacgtcccgttttgtatggtattgcaaggctttgatttcctggctgcttaaacgccgggcctctgcagccgaacagttttctctcagctgctcaagtgagctggctccggtaatgacagaagcgacggcctgctgtgacagtaagtattgaagagaaagctccgtcatgctcaagtcaggtgcggcagcgctgatcgcttttttggtttcttccagttctgcaaaagaatatgttaaatagccgttctcttttacgcttgcggccgcttgatcaagcggtttttccgtaagaagccctttagcgacaggccctcttgcgactacgctgattccgttctcctctaaaaggggaagccactcctcgggacgccggtccagcaggctgtattgcatcataacgctggtgatatttgattttttcacatattctttaataacattcggacgaatcgaggaaataccgtaataccggatgacaccttcctgttttaagtcctcaaatgcttcgatcgtttcgtcaatatggtcttccatcgtgccgccatgcagctgataaaggtcgatatagtccgttttcagccggcgcaggctgtttttgaccgcttcttttatgtatcctttggaagcgtcccaatgccagccgtctttatcatcattccagcggtttccggctttcgtggctaaaatgatgtcgtgtctgcggtttttgacggcctccccgacaatttcctcatttctgccgaaatcataaagatcagcggtatctaaataattgattccaagctcgatcgcttcatccaaaatagacagcgctttagctttatccgtgcccagcgacatacagccgagcccgatttcgcttatttctaaatcagaatgtcccagtgtgcgttttctcatcgtttcgctcctttttatagtcttttattgaccgtaatataaaggcgcgaagttttcaactgttaaggcccggtgatccaatctccgacatagcggaatgtccgtccgtattctttcagtttagcccgcacttcccacgcctttccgaccaatacgatactcttatccttccggtacaccttcaatcgaaaagcacctccctctcatgcatgtatgataaaatatatgaggcataatagagagacagaacgggagatgacatgatgaaacatttagaagaaaaaacacttgcgaaaaaaaagctgtatgacgggaaagtcatagatctttacttagaggatgtagagctcccgaacggaaaaacaagcaagcgggaaatcgtcaaacatccgggagcggtggccgtacttgcggtgaccgaggaaggaaaaattattttggtgaaccagttcagaaagccgctggaacggacaatcgttgaaattccggccgggaagcttgaaaagggggaagagccggaacatacggcgttaagagagctcgaggaagaaacgggatatacggcggaaaccttgacgaaaatcaccgctttttatacatcacccgggtttgctgatgaaatcgtgcatctctttcttgcggaagggctttcgccgctggaagaaaaacgagagctggatgaggatgaatttgtcgaagtcatgcaggtcacgcttgaagaggccgtgaagctgattgaatcccgcagggtgtatgacgcaaaaacggcgtacgcgattcagtatctccagctgaaagcagcgctgaaggaaaaatgatgaaaaccatctatgcggatctgcatattcatatcggccgcacctatacgggaaaaccggtcaaaatcaccggggccaaaacgttgacgctgcaccggattttagaagaagccagtgaggggaagggaattgaactattgggcatcatcgactgccattccccggaagtcatagaagaaatcgagcgcggaattgatgaaggcggataccgtgagctgaaagaaggcggcatccggtatcggaatacgacgcttctgttgggcagtgagcttgaaatctatgatcacacatgccgcgggccgattcacgttctcgtctttatgccgtctcttgccgaaatgaagatgttttctgagtggcttgcaaaaaggcttaaaaatatccaactcagttcccagcgcatttatgaaaccggtttgaatcttcaaaggaaaacaaaggaattgggcgggctgtttattcccgcccatatgttcaccccgcataaaagcctgtacggaaaaggagtcatatcttctttgacagaagttttcgacccgtcgctcattgacgcggcggaactcgggttaagctgtgacaccgacatggcttcgcgggtaacagaacttgatccgtatacatttttaacaaattctgatgcgcattccttaggaaaaatcggcagagaatataatgaaatgcttcttaaagaagcgaatttcacggaattttcgctggctttaaaagggaaggacggaagaaaaatcacggcgaattacgggctgaacccgaagctcgggaagtattaccggacggcttgcgaccgctgcggcagcccggttgaaaaaggagcttccgcatgtccggagtgcggggggaaaacaatgacaaaaggggtcagtgaacggctggaggaactgagcggaccgaaaaaaagccgcatgccgcggccgccgtatattcatcaaatcccgctgcagttcattcccggggtcgggccgaaaacgttagaaaaactgaagcgggccttcgggacggagatggcgattcttcatcaggcgcaagaagaggaattggcgcgtgtcgtccagcctaaaatagcggctgtcattcataaagcgcgtaccgggcagctcgtccttgaggccgggggcggagggacgtacggcagaatcaagccgtaaaagccggtttttaacggagctcctcctgcaccttctttttcgtgcggacaaacgcaatcaattcgatgatttcatcctgattcagcggctgtccgtcaacggtcagtgtgccgcggccttgtgcggcgtttgttaattcgatggtctgggcaaacggctccgcctttttttcagtgcgcccgagtaaatcgtcgcacgtcgtgtcaaacagatcggcaagcgtgcccagcgcctcgaatgacggacgccggtatcctgattcatacccggcgtacgtgcttttggcgatgccgagacggtcagccgtatattgaagagaccaatttttcttttttctcagttcagttaaacgatctaaattcatattcaaaaccgctccttttcacttgagcaaattatatcatatcgatatgcaaaagtgtacgcgaattgaataataatcacttgattaatttcattcgtctgtctataatttgattaaaagtatgcgaaaagcgaatgcttaacacatcttgagaaatggatgaagaggtgcagggtatgaaaaaattattgctgttaacaaccggaggaacaatcgcctcagtcgaaggagaaaacgggcttgcacccggggtgaaagcagacgaattgttaacctacgtatcaaaacttgataacgattacacgatggaaacccattcgttaatgaacatcgacagcacaaatatgcagcctgaatactgggccgaaatcgcaaatgctgtcaaagaaaaatatgacgcatatgacgggttcgtcattacgcacgggacagacacaatggcttatacatcagcggcactgtcttatatgcttcagcatgctgataaaccgatcgtcattacgggttcgcaaatcccgattacatttcaaaaaaccgatgccaaaaaaaatatcacggacgcgatccgcttcgcatgtgaaggggtgggcggcgtatacgtcgtatttgacggcagagtcattcaaggcacacgcgccattaaattaagaacgaaaagctatgatgcatttgagagcattaactatccgtatatcgcgtttattaccgaaaacggaattgaatacaacaaacaagtgcacatgccaaaagacgatgcttttacggtcaatacttcactttgcacggacgtgtgcctgctcaagctacacccggggctgaaaccggaaatgtttgacgcattaaagggcatgtacaaaggaatcgtcattgaaagctacggcagcggcggcgtgccgtttgaaggaagagacattctcgccaaagtcaatgaaatgattgaaagcggcattgtcgtcgtcattacgacacaatgtcttgaagaaggagaggacatgagcgtctatgaagtcggccgaagagtcaatcaagatctcattatccgctccagaaatatgaacacggaagccatcgtgccgaaattaatgtgggcgctcggccagtctcacaacttggctgaagtcaaaaacattatggagacaccgatcgcagacgacgttgtactgtaaaaacatgactaccacaaagagaaagtagggttttagcatgacaaacgcgcaaaaagaatatcgtcaggaaaaagatttcctcggagaaaaacaaattgaagctgatgtgtattacggaatacaaacgctgcgcgcgaaagaaaactttccgattaccggataccgcatccacgaagaaatgattaatgcgctcgccatcgtcaaaaaagcggcggcgcttgccaacatggatgtaaaacggctgtatgaaggaatcggaaatgcgattgtacaggccgcagatgaaattcttgagggaaaatggcatgaccaatttatcgtcgatccgatccaagggggagccggaacgtccatgaacatgaatgccaacgaagtaatcggcaacagggctcttgaaatcatggggcataaaaaaggtgaatacattcacctcagcccgaacacacacgtcaacatgtcacaatcgacgaacgacgtgttcccgacggcaatccatatttcaaccttgaaacttttggataagctccttgatacgatggcgcatatgctcagtgtttttaaagataaagcgaaacaatttgattctgtcattaaaatggggcgcacacaccttcaggacgctgtgccgatccgtctcggacaggaatttgaagcatacagccgcgtgcttgagcgtgacataaagcgaattaaacaatctcgccagcatctgtatgaagtaaacatgggggcaacggccgtaggtacgggacttaacgccgatccgcgctacatagaacaggttgtgaagcacctggctgacatcagcggactgccgcttgtcggcgccggccatttggttgacgccacacaaaacactgatgcgtatacggaagtttcagccgcgttgaaagtatgcatgatgaacatgtcgaaaatcgccaacgatctgcgcttaatggcttcaggtccgcgcgcgggacttgcggaaatttcattgcccgcccgtcagccgggatcatccattatgcctgggaaagtcaaccctgtaatggcagagctgatcaaccaaatcgccttccaggtcatcgggaatgacaatacgatctgcctcgcttcagaagcgggccagctggagcttaacgtaatggagccggtactcgtatttaacctgcttcaatccatcagcatcatgaataacgggttccgttcatttaccgaccattgtctggcgggaattgaagccaacgaaaaacgtctgaagcaatacgtggaaaaaagcgtcggcgtcattacagcggtcaatccgcacctcgggtatgaagcggctgcgcgaattgcccgtgaagcaatcatgacggggcaatctgtaagagatctttgccttcaaaatgatgtactgacagaagaagaattggatatcattttgaatccgtatgaaatgacaaaaccggggattgccggaaaagatctattagaaaaataaattttaaagcaacaacagccgccttttcacgttttttagtgaataggcggttgccatacaaagggatgaggcagtatagtataatttgttatatcatttgatgaaagcgttttagcttttttcttctagggggattttcttgtgaaagaggccagattgccaaatttattggaaattattatcttattattcgggtttttagcacttgtcttatcgttcacagtgtttttagacctgccgatccagctagctctattaatatcctggtttttcgctattattctcggagtcaggctgggatattcatataaagacttgcaggcttcgattgtcaccgggatatcaaacggtcttgaagcggtattgattctcgtttcggtcggtgcgctcatcgggacatggattgccggcggcgttgtgccgacgttaatttattatggtttagagtttattaatcctcatattttccttctggctacactggttatttgttccgttatgtccgttgcgaccggaacgtcgtggggaaccgtgggaaccgcagggatcgccatgattgccatcggagagggaatgggtataccgcttccgatcgtagcgggagccgttttgtccggggcttacttcggagacaagctttcaccgctgtctgacagtacggtgcttgcctccacgctttctaaggtggatgtgctgtcacacgtcagagcgatgatgtatctgtcaattccgtcctatattattacggccattctgtttaccgtaacgggatttatatacggcggaaaaaatattgatctcgacaaagtggaatttttaaaatcttcattgcagaaaacatttgacattcatatatggatgctcattccggctgttgtcgtcgttgtccttctgattttgaaaaagccgtctatgcccgttattatcatcggtgctttgcttggcgcaatctgggcttccgtctttcagggaatgaattttgctagtgccatcgcgactgcttataatggtttttctattaaaacggacgtcgaatttttaaacggcctgttaaaccgcggaggcattaccggtatgctggatacgttagtcgttatcctgttcggtctcggttttggaggaattctcgagaagctcggcgtattaaaagtgattgtctcaacttttgagaaaaagctgaccacaccgggaaatgtgacgctttcgacattgatcgtcgcccttttaggaaacattttcggctgtgcgatgtacgtgtcattgatcctgacgccgaaaatcatggagaacagttatgataaactgaaacttgacagaagagttttatcccggaacgcagaggtgggcggcacgcttacttcagggatggtgccgtggtctgataacggcatctatatggccggcattctcggcgtatccacattttcttatctgccgttcatgtggctcagttttgtatctatcggactggcaatattgtacggatacacggggaaattcatttggtacacgaaagaaaaatccttgcaatctcaaaaattgggttaggaggttcatttcatgattacaaagcatatgattcggacgttaatgattgaaacgccgactgttcccggaaatctcggaaaagtggcaaccgccatcggagtgatgggcggagatatcggggaagttgaaaccgttaaagtcggcccgaactacacaatgcgcaacatcacggtgcaggccgaaaatgaagagcagctgcaggaaatcattcaagccattgaagctctcggtgaaggcatccggcttcatacagtctcagatgaagtgctctctgctcatgaaggcggcaaaattcagatgaaaagcaaaatgccgatccggacactggctgagcttggccgtgtttatacgccgggcgtcgccgatgtgtgcagactgattgaaaacgagcctgaaaaagcgtccatctatacgacaatcagcaattctgtcgccattgtcaccgacggaacggcgattctcggcctcggcaatatcggctctgtcgccggaatgcccgtaatggaagggaaagccgcgctttttgaccagctggcgggtatcagcggaattccgattttgctcgatacctctgatccggaagaaatcattcgcacggtaaaacatatttccccggggttcagcggaattctgcttgaagatatcggttcgccccactgctttgacattgaagaccgcctgaaagaagaactggacattccggttatgcacgatgaccagcacggcacggcggtcgtcacgctcgccgccgccatttccgcttgtaaaagcgccggtcttgatttaaaagaagcgaaggtcggtcagatcggtctcggcgcggcaggcgtcgccatctgccgcatgtttatggcatacggagtcaaagcggtctgcggaacggacaagtcagaagacgcaatgaaccgcctcgctcagtacggaggtcagccgcttggaagcatcaaagaattaatggacacgtgtgacattgtgatcagcaccacaggagttccgggtctcattaaaaaagaggatgtcagaaaaggacacgtcattctggctttatctaatccgaagccggagattgaaccggaagaggcattacaagccggagccgcttatgcagctgacggccgttcggtcaataatgttctcggcttcccggggattttccgcggcgcgctgaacgccaaaagcaagaaaatcgaccatgaaatgcttgtggcggccgcagaagccatcgcctcttgcacgaaacacggcgatctcgtgcctcagcctttggatgcggacgtgcatcaagccgtatcagcagccgtagaacgggccgcggcagggaaataaacaactcttacagtaccggacatgtgccggtgctgtttttttatcatgaataggaagcggaattcttaggcaggctaacagatagcaaaagacggaataaagaggtgtcgatgtggattattttccgctgatccatacaaatatttgggatgctgtgatcggcgtgccggtcgtcttatgcgtcacacagctgatcaaagtgttctgccgggttccgggcatattcgttcccacgattgcccttgctgccggaaatgttgtgtctatcgttttcggtcatcatgaacacgtgtatgcggggatttttatggggtttttttacggatacgccgcaatggggagctattcatctgccaaaacgtctctgcgcgcttaccggtcgaaacatgagccgtattcatgaacacatctggatttttttgttatgataaagaaaagggaaaaaggagcggttggcacatggcgaagagcaaaacgaaaaaaatgcgggagcatctcaaaagaaacgggatgcgtgacgcagtcctgtcaagggggacagcgccgtctttcagcacccatgaaagagtgacgaaaaccaaaaaagacaggcttgaaagaataaagcataaaaaaaggaacccctatgatcaccggagtgatgacgggggttctttttttatgcctgaatctcgcgcctttctatgatttctctgtcatgttttctcttttctttcatacaatctactaaatcaagtcaatagattagcgggaggaaagcggtatgagaaaacaatcgtacaaagaactgttttttcgccatgtaaaggatcatctgtcactttatatatttgtgttcgtcttgtttttgatgggggtcattttcggggcgatcatcgtcaacagcatgaccatcacgcagaaagaagatttgtattactatttaagcaagtttttcggacagctgtctgacggaaaacatgccggcgcttcagaaatgttttggcaggccgtctttcatgatgtgaaatatttggggctgatgtggattctcggtatttccgtgatcggtcttccggttattttcattatggtgttcttaaaaggaatcgtcgtcggcttcacggtcggttttttagtgaatcaaatggggatgaacgggtttttcctgtcatttatttcggttctgccgcaaaacatcgttctcattccggcgtatcttatcatggggacatgctctatcgctttttcactgaaactgatccggcagctgtttgtcaaacgcagccttcatgacgcgccgatccaatggttcggacgttacgccttcgtgctgattctcatcgttttcttctcggtcatcgcctcgctgctcgaggcgtacgtgtctccgctgtttatggaaaagctgtcatcacgcatattttagaattattatcacaaaataatacttttatttatcagtttataataattatagttggaactctgcgcgtattttgttataatgagtcatggaatgcggcgtaggagggaaagacatggaaaaccgtattgatcgaattaaaaagcagctgcactcgtcaagctacaagcttacgccacagcgggaagcaacggtaagagtgctgcttgaaaacgaagaagaccatttaagcgcagaagatgtatacctcctcgtaaaagagaaatctcctgaaattggtctcgctacagtataccgtacattagaattattaacagaattaaaagtcgttgataaaattaacttcggggacggcgtatcccgctacgaccttcgcaaagaaggcgcggctcactttcatcaccatttggtgtgcatggagtgcggagccgtcgatgaaattgaagaagatctgcttgaagacgttgaagaagtgattgaacgtgattggaaatttaaaattaaagatcatagattgacttttcacggaatctgccaccgctgccgcggggatgaaacagagtaaaagcctacgaaccttttctgccaggaaagggttttttgctgtctttatgtataaaagcctttgaaattggcataaggtgtactaacagccgccaaaagaaagggtcgatcgaaagatgggcagattcctaaaaacagccgcggatacgatcaaagtgtttattctgttcacaggttttaccgcgctgttctattatgctatgatatgggtgaattcagagtatgaaaactatcatcggtacgataaaccggaaggctccgccgtcaaagtggccaaaacggaacatgaggagaaagacggctggttcggccgattgatctttttttaccaaaacggggagtagatcaagagtgaaggatcaaattaaggatttcatccattatgtgagggttgaaagagggctgtcccaaaatacgatgatgtcctatgagcgtgatctgaaaagttattctctcttcttaactgaaacccttcagatcacttcatggaatgatgtgacccgtcttcatattattcaatatttaaagcatataaaggactccgggaaatccggcaagacgtctgcgaggcatttggcgtcaatccggtcttttcatcaatttctgttaagggaaaaagccgcggataaagatccttcggtacatattgaaacacaaaaaacagagcggacgcttccgaaagtattggcgcttcaggaagttgagcggttattggacacgcctaagcttgacagcccgttcggcctcagggataaagccatgcttgaactgctgtacgcgaccggcatcagggtcagcgagatgatcgagctgaaattatccgacgtccatttgacgatgggatttgtccgctgcttcggaaaagggcggaaagagcggattgtgccgattggtgaagccgcttctcatgcgatagaagcatacattgaaaaagccagagggaaattattaaagaaaaacgtaaccgaagcgctttttctgaatcatcacggcaggcagatcagccgtcagggattctggaaaaacctgaaaaaaatcgcacttgaagcggggattaaaaaagagctgacaccgcacacgctccggcactcctttgcaacgcacctgctcgaaaacggggcggatctgcgcgccgtgcaggagatgctcggacatgccgatatttccacgacgcaaatttatacgcatgtgacgaaaacaaggctgaaggacgtgtacaaacagtatcatccgcgcgcttaggagccgctgccagaggggccgcggctttttttgccggattggcggaatacagagaaggttctaattatttgaatcggcattgtcaacaagaatgtaaacggtttatacttgagttgtctgacctctgtaagctacaatggacagatggaagaaaaggaggcttttatgatgtctgaatacaaatataaccgggtatttttgatcgtaatggattctgtcggaatcggtgaagcgccggacgccgccgattttaatgatataggcgcaaatacgctcggacacatcgcagagcacatgaacggcttacatatgccccatatggcgcagctcggtctcggactgatcggagacattaagggcgtggaaaaaacggagcaccctcttgcgtactacggaaaaatgcaggaggcgtcaaacgggaaagatacgatgacggggcactgggagattatgggcctctacattgaaaaaccgtttaaagtgttcccggaaggatttccggatgaacttcttcaggaacttgagcggcgttcaggacggaaaatcatcggaaataagccggcttcaggcacggcgattctggacgagctcggaaaagaacatatggaaacgggtgcgctgatcgtttatacatcagcagattccgtactgcagattgcggctcacgaagatgtcgttccgcttgacgaactgtacagcatctgtgaaacggccagagaactgacgcttgatccgaaatacatggtcggccggattatcgcaagaccgttcgtcggagaaccgggcagcttcaaacgcacgccgaaccgtcatgattatgcgctcaaaccgttcggccgcacggtaatgaacggaatgaaagacagcggattagacgtcatttccatcggcaaaatttctgatatttatgacggagaaggcattacatcttcccgccgcacggtatctaatatggatggcatggacaaagtgattgaaacgctcggtgaagagtttacgggtctgagctttgccaacctcgttgattttgacgcgctgtacggacaccgccgcgatccggaagggtacggtaaagcgctcgaggaattcgacgcgaggcttccggaagtgtttgagaaaatgaaagaagacgatctgcttatcatcactgcggatcacggcaatgatcctgtccatcacggcacagatcacacgagggagtatgtgccgcttcttgtgtacagcaaaaagcacaaacacactgaacagctgccgcttgcggatacatttgccgatatcggcgcaaccattgcggataatttcaaaacggaaaagccggaatacggaaaaagctttttatcaagattacagtagggggactttttttgaaacaaaagatcgaacgtgctgctgcatttattaaagaacacgtgaaagaaacaccaaagatcggtctgattttagggtcagggctcggcgtattggccgatgaaattgaaggagctgtcaagcttacatatgaaacgatccctgattttccggtctcaacggtagaaggccatgccggccagcttgtgatgggaacgcttgaaggcgtgcaggtcatcgcgatgcagggccgctttcattactatgaaggctactcaatggatcaggtcacatttcccgtccgcgtgatgaaggcgctcggcgttgaatctcttgtcgtgacgaacgcagccggcggtatcaacactgaattccgcgccggcgatctgatgattattacagaccacatcaactttacgggcaccaacccgttaatcgggccgaacgaagctgaattcggaccgagattcccggacatgtcagaagcctatgacaaagagctgtcaggcttggctgaaaaaacggccgatgagctgggcattcctgttcaaaaaggggtgtatacagctgttacggggccgtcttacgaaacgcctgctgaggttcggtttttaagaacgatgggttctgacgctgtcggcatgtcgaccgtgccggaagtcatcgtcgccaaccacgcggggatgcgcgtgctcggcatctcatgcatttccaacgcggcggcaggtattcttgaccagccgttatcccatgaagaagtaatggaaatgacggaaaaagtaaaaggcggctttttgaagcttgtaaaagccgtagtcgcacgatctcaaaaataagtcagcatcagtcagctgtttcttcggaagcagctgtttttttgtgccctcaacacgaaacattttccagatgaggcgtataaaaccaccggatttggaaaaaataaaaaggattatgaaatggagggctttggagatgaaacgtcttatatccactttgttgattggcattttattaacggcatcagcaccgtccgcttttgcaaagccggacggaaaacatacatcggagctcgctcatgaagccaaaagcgccgtgctgattgaacgcgatacgggaagcattctttataacaagaacagccgggagcgtctggcgccggcaagcatgacaaaaattatgaccatgcttttaatcatggaagcgcttgacaaagggaaaataaagatgagcgataaagtcaggacgagtgaacatgccgcgtccatgggcggatcacagattttccttgaacccggagaagaaatgacggtaaaagaaatgctcaaaggaattgcgatagcttccggaaatgacgcatccgtcgcaatggcggagtatattgccggttcagaagaggatttcgtcagccggatgaacaaaaaagcaaaagaattgggattgaaagatacctccttcaaaaacccgacgggactgcctgaaaaagaccattacagctctgcttatgacatggcgaaaatggcgaaggaattattgaagtatgataaaatcactcaatttacgggaacgtatgaagattatttaagagaaaacacagacaaaaagttctggctcgtcaatacaaaccggctgatcaaattttatccgggtgtagacggcgtgaagacgggctttacaggcgaagcgaagtattgtttaaccgccaccgctaaaaaaggaaatatgagggtcattgctgttgttttcggagccagcactccgaaagacagaaatgcccaagtgaccaaaatgcttgattacgccttcagccagttcaaaacacacccgctgtacaaacgggatcaaatcgtcggaacggtaaaagtgaaaaaaggaaaacagaaactgatcaagctgaccacatctgagccgatttctcttctggccaaaaagggagagaacatggacaaagtaaaaaaagaagtgaaaatcaacggcaatgtaacggctccggttaaaaaaggagaggtgctcggcagcctcgttctgaaaaaagacggaaaggtgctcgttgaaagcccggtcacggcaaaagacgacatggaaaaagcgggttttctcacttttctgaagcggacgatgggagattggactaaatttaaataatcgtggcgaacgggcactagttttgtcatagtgaaggaattgctttcccgaaaatcgaaacactcattatccgatcatatcaaggaggaatgagcatgagccttggaattgactttcatgtcaaagaatccgtgctttgtattcgattaacaggtgaactcgaccatcatacggcagaatcattaaaacaaaaggttactgaatcgctggaggctgacggcatccgtcacattgtgctgaaccttgaagatcttaccttcatggacagctccggcctcggcgtgattttagggcgttataaacaaattaaacagctcggcggagaaatggtcgtgtgcgcgatttcacccgcggtgagacgtctgtttgacatgtccggcctgtttaaaatcatcaggttcgaacaatcagaacaaaaagcgcttttaacgttgggggtggcatcatgaaaaacgagatgcatcttgaattttcagccctcagtcagaacgaatcgtttgcgcgcgtaacagttgcttcttttatcgcacagctcgacccgacgatggatgagctgacggaaatcaagaccgtcgtatcagaagcggtaacaaacgcgatcatccacggctatgaagaaaactgcgacggaaaggtgtacatctccgttacgctggaggatcatgtcgtctatctgaccatacgtgacgaaggcctcgggatcacggatcttgaggaagcgcgccagccgctatttacgacaaaacccgagcttgaacgctccggaatgggctttaccattatggaaaacttcatggatgatgtcacgattgattcctcgccggagatgggaacgacgatacgcttaacaaaacacctatcaaaaagcaaagcgctttgtaattaaggagatttgttatggatgtggaggttaagaaaaacagcaaaaacgcgcagctcaaggaccatgaagtcaaagaattaatcaaaaagagccaagagggcgaccagcaggcaagagacctcctcatagaaaaaaacatgcgtcttgtgtggtccgtcgttcaaaggttcttaaacagaggctatgagccggacgatctgtttcagatcggctgtatcggattgttaaaatccgttgataaattcgatttgtcctatgatgtccgtttttcaacttatgccgtgccgatgattatcggagaaatccagcgcttcatccgcgatgacggaaccgtcaaagtttcaagatctttaaaagagctcggcaataaaatacgccgggcgaaagatgaactgtcaaaaacatacggaagagtgccgaccgtccaggaaatcgcggaccatttagaaattgatgcggaggatgtggtgcttgcgcaggaagcggtgcgggcgccttcatccattcatgagaccgtgtatgaaaatgacggagacccgatcaccctgcttgatcagatcgccgatcattcagaagagaagtggtttgacaaaatcgccctcaaggaagcgatcagtgatttggaagaacgggaaaaactcattgtctatctgagatattataaagatcagacacagtcggaagtagccgaacggctcgggatttcccaagtccaggtatcgaggctggagaaaaaaatattaaagcagattaaagtgcagatggatcatacggaaagctgaccttttacgggccggctttttttatttgtgcatcggtggtaatttatggtcttttgccgctgatgaatgagaacaaaagtgaaccgcatactacatatataaccacccgaaagatggtgatgcaagatggaaagacgaatatttctcagacttcgccaccgcgtgaaggctcataccggagatatcatcacaatcggcgacgccgcgcagatcgcgggacagcaaaagctgaaaaaaaaactgtcggcactgccgctgtataaggtcacgaaaaaagacaaaaatatcgtcgtgctggacatcataaaagtgctgaaaaccattcataccgcttttcccgctcttgatgtacagaccgtcggcggcgctgaaacgatagtggaaatccattaccagaaaaagcagctgtcagccgttttgttcgtcggtgtctggctcctgctttttatcggttcatgtcttgccattatgaattttcatgaagatgtcagtatgagagaagttcatatcgccttatatgaaatcataacgggcgaacggaatgaatatccgtatctgcttcagattccgtacagcatcggcctcggtctcggtatgatcgtcttttttaatcacatcttcaaaaaacgcctgaatgaagagccaagcccgctggaagtcgagatgtttaattatcagcttgatctcgatcattatgtcgcaatgcacgaaaatgaagagacgatgaaagatctgcatgatcgttagcattcttttcgttatatttgtcgggcttggcggagggctgaccgtgggtgcgggatttgtggcttttttaaccgttatgggaatcatcccccgccttatgcagctgacaaaaacaatgcgctttgtacaggcctacgaaggagctgttatttcaggagctgtgttcggcggctgggaaaccttaaatatgaatcatttttttttaactgaatggctggccgttccggtcgggcttttggccggcatgtttgtcggcatgctggccgccgcgcttacagaagtgctgaatgtgcttcccattcttgccaaacggatcggcttcggcagcaaaatcatcatattgctgatggccattgtgttcggcaaaatagccggctctttatttcattggctgtattttatccatcattcataaggaggaaccgacatgacaaacttaaaagaaaattacaaaacaaaagtgaaagactatcagccgaaaccgccatatgtttggaattgcgtcaaagcctttctgatcggcggtttgatctgtctgatcgggcaggctcttcaagacttttacatccacttttttaattttaatgaaaaaacagcgggcaacccgacggccgccactcttattttaatttccgcccttttgaccggattcggcatttatgacagactcgggcagtttgccggagcgggttcagccgtgccggtgacgggttttgcaaacagtatgacaagcgccgctctggaacacagaagtgaaggactcgtgctcggagtagcgacaaacatgtttaaattggcgggaaacgtcattgtattcggcgtcgtggcagcctatatcgtaggcctgatacggtttgcttgtgaaaaactgttttcgtaggaggagaaaaaatgaaattgaccggaaagcaaacctgggtgtttgaaaacccgttatttgtaaatgcggcgggaacggcagccggaccgaaagaaaaagacggcccgctcggttcgctgtttgataagacatacgatgaaatgcattgcaatcagaaaaactgggaaatggcggaacgtcagttaatggaagatgccatcaactccgctttgcaaaaacagaacttgaaaaagagcgatattgatttgttactcgcgggggatcttttaaatcaaaatgtgaccgccaactacgtcgccagacatctgaaaattccgttcctctgtctgttcggcgcctgttcgacatcaatggaaacgattgccgtcgcatccgcgctcattgacggcggttttgcgaaccgtgcgatcgcagccacgagcagccataacgcgacggcagaacggcaattccgcaatccgacggagtatggcgggcaaaaaccggataccgccacttcaacggtcacggggggcggggcggtcatcatcagtcaaaacccttctgatatcaagattacaagcgcaacagtgggaaaagtaagcgacctcggaataacagatccgttcgatatgggatccgccatggcgcccgctgccgccgacacaatcaaacagcacctgcaggacttaaaccgcacggcggatgattatgatctgattttaacgggagacctttcaggcgtcggctcgccgatcgtgaaagatttgctcaaagaagaaggctatcccgtgggaacgaaacacgatgactgcggtcttctcatctatacgccggaccagcaggtgtttgcgggcggaagcggctgcgcctgctccgcgcttgttacgtacacacatatttttaaccaattaaaagcggggattctaaacagggtactcgttgtcgcgacaggagcgcttttgagtccgacaatgatccagcagaaggaaaccattccgaccatcgcgcacggtgtggtatttgagcgggcgggaggtgcatcataaatggaatatctgttggcttttgtttgcgggggaatcatatgcattatcggtcagctgctgcttgacatttttaaactgacacccgcccatgtgatgacaacttttgtcgtcatcggcgccttgttagatgggttcggaatttatgacaaatttatcgaattcgcgggcgcgggcgcaacggttcccatcgtcagcttcggtcacagcttattgcacggcgccatgcatcaagctcacgagcatggatttatcgggatcgccatggggatttttgaacttacttccgccggtatatcttcagcgattttattcgcatttcttgtagccgttatttttaaaccgaaaggataatgcctgatgacgaaacggaaggtcattcttgtgacagacggggacgtgtacgccgccaaaacaattgaatatgccgcggaaaaagcaggcggacggtgtatttcccaatcaaaaggcaatccgtcaacgagaagcggccccgaacttgttcagctgattaaagccgcgccgaatgacccggtgtttgtcatgtttgacgattcaggcctgcaaggggaagggccgggcgaaacggcgctgaaatatgtcgcctcacatcaggacattgaagtgctgggggtgattgcggtcgcttctaagacccatcaggctgaatggacgaaagtcgatgtctccattgaccgtgatggagaagtgacggagtttggcgtcgataaaaccggaatgagagaaatggacgagcacagaatgaacggagatacggtgtattgtctggataaattggacgttcccctcattgtgggcatcggcgacataggaaagatggggagaaaagatgacatatccaaaggctcgccgatcacgatgaaggcggtcgaattcattttagaaaggagcgaaagccatgccggaaaaaccggaaaacatgatcaaggtgtaccgggatcctagaaaaaatgaacaattttttaaagaccgcgtcggtatgggaacgagctatgatgtcggcgtccgcaaagttcgagtattagaccgggaagtccagatttactttgtcaacggattaaccgatactttgtttatcattcatttaatggaacagctcgtcgacgtcaataattatgacgagaatgcggatgaagcgattgacgttgttgaaaacaggcttgtcaatcagcaggtccaaaaagtcaaaacgctcgacgaagcaacggatcaagtgctttccggacttgtggcggttatcgttgaagacgcgggcttcgcctttatcgttgacgtcagaagttatcccggacgcacacctgaagaaccggatacggaaaaggtcgtccgcggtgcaagagacggttttattgaaaatatcgtcattaatacagcattgatcagaagacgaatcagggacgaaaggctccgcgtcaaaattacgaaagtcggcgagcgctctaagaccgatcttgcgattgtgtatatagaagacatcgcggacccggaccttgtcagcatcgtcgaaaacgaagtgaatgcgattgacattgacggattgacgatggctgataaaacggtggaagaattcatcgtcaaacagggttacaatccgtttccgatggtcagatacacagagcggccggatgtggcagccaatcacattttggaagggcacgtcatcatcgtcgtcgatacgtcaccgagcgtgatcataacgccgacaacgatatttcaccatgttcagcatgcggaagaatacaggcaggcgccttcagtgggcacatttttaagatggatcaggtttttcggtattattgcttcaaccgttctgcttccgatttggttcctctttgttctcgaaccgtctcttctgcctgaaagattggattttatcggtttaaataaaaatacgcacatcccgatcattctgcaaatctttttggccgatttggggattgagtttctcaggatggccgcgatccatacgccgaccgctttatccaccgccatgggtctgattgcggcggtgctgatcggtcaaatcgccatagcggtggggctgttttcagcagaagtgattctgtacgtatcgatcgccgccatcggatcatttaccacgccgagctatgagctcagcctcgccaataaaatgatacgcctcatcttaatggtgctcgtggccattttccaagtaaaaggctttgtgataggttttacattgctgctgatcataatggcgaatatccgctcgtttcacacgccgtatttatggccgtttttaccgtttaacggcaaggcgctgtggcaggtgctcgtccggacgacagtgccgggagccaaagtcagaccgagcattgttcacccgaaagaccgtcaaagacagccaagcggttcataatcgcattgaaaccgacagaagattatgatattgtatgtcttaacttatacgggacttgtataaggacagctcaaaagaagctgtccttttcacccatatgcggatcagaaagagggaatgagcattgttcttacatggcacaagcagacaaaacaaactaggtcatttggaaatcggaggtgtggacgcgctgtatttagcggagcattacggcacgcctctttatgtttacgatgtggctttaatacgtgagcgcgctaaaagctttaaacaggcattcattgacgcggatttaaaggcgcaggtcgcgtacgcgagcaaggcgttttcttccgttgcgatgatacagctcgctgagcaggaggggctctcattggacgttgtatccggcggagagctgtttacggcggttgcggctggttttccggctgacaggattcactttcacggcaataacaaaagcgaagaagagttgaaaatggcgctcgatcatcaaatcggctgcattgtcgttgataatttttatgaaatatccttactcgcggaactgtgccgcaaatcagggcgcacaatggatgtgcttctgcggatcactccgggggtagaggcgcatacgcatgattatattacgacgggacaggaagattccaaattcggttttgatctgcataacgggcaaatagaaaaggcgattgaacaagtattacagtcagaccatatccgccttctcggcgttcactgccacatcggatcgcaaatttttgatacggcgggctttgtgctggccgcagaaaaaatctttgcaaaactgaatgaatggagagaatcattcggctttgtctctgaagtgctgaatttagggggcggctttggcatccgctacacggaggaggatgaaccccttcatcccgccgtttatgtggaaaaaattatcgaagcggtaaaagaaaacgcagcgctgcacgcttttgacattccggagatctggattgaaccgggacgctcgctcgtcggagacgccggaacgacgctttataccatcggttcgcaaaaagaagtgcccggcacccgtaaatatgcagcggttgacgggggcatgagcgataatatccgtcctgcgctgtatcaggcgaaatatgaagccgtatcggcaaacagaatcggagaacaccacgataaaacggtatccatcgcgggtaagtgctgtgaaagcggtgatatgctcatttgggatatagaccttccggaagtgaaagaaggcgatcttctcgccgttttctgcacgggagcatacggatacagcatggctaacaactacaaccgcattccgcgtcccgccgtcgtttttgtggaagacggcgaagcgcatcttgtcattagaagggaaacttatgaagacattgtaaaactggatctgccgtttaagacgggggtcaaacaataaataaaaaagagaccggaacaatggcgtccggtctctttttgcattcagctgttgttagaacttgatccgctgtctcctgtaaatacagacacgatcgcattccaaatcgaagcgaagaagtcaatgactttttgaacaaagcttttgccttcatcggattgaatgaacttcgtgattttgtcttttgccttgtcaagctggctgccgacttggccccaatcaatcttggcatttttcattttattaaacaatgaaacgagctggtctttttgagcgtcagtcagtgtaatgttaaggtttgaagccgcatcatcgacctttttctcaattccttcttttgtatcgggcacaccgtttttcgcgaaatcatctttaatgtttgcgatgagcgcggaggcgtttttatccccgattttatccccgagatttgaagtggtgacaagctcttggttggcgacctgttttacatcttctgaaatcgctttgtctgatgagacttcatatgccttgatgattcccgttaatgctgcggtgcctgatacctcaaacggcgccgtcacgtatactttcgcatctttcactcctgctgtcatcagggcgtttaagtacatttcatccgtgatggaatcgatattatgggtcttaacgtcaagcccggaccctttctttgccaccgtgatggatgatgaagagatggctcttgtgccgatttgggcattcgatatatattttcccagatattcatgttcttctttattcgtgaccgtcacttttgtcgcgttatcagggacatttaattcgtcaagcactttctgacggttttcgtttgacagatccgcccccagtgtgacgatgacatctccgactgcggcatcggccaggctgattttcggtattgtgcacaatacaacggccgccgccagcaatccaatccacatttttttcaaagcggttaacctccttcttttcacaaatgccgttttgaagcggtttgtgagggcctgcgtgaagcagttccgatacatagacggctgtgaagctgttctggtttcattttctttctgcggaagcggggagattcgttttccggctgaaggtgtggtataatagccgcgaaaagaagagcagaggcctcttccttcaaaagaatatcaaaaagaaagccggcttacaattgaaattcatattgaagaaggctttgacaaaaaacaatacggaagtaggaatgagaatgaaaactggttatatcgaaatggaaaacggcagcagaatcgaatttgaactttatccgaatgaagcgcctaatacagtcgctaactttgaaaacctggcgaatacgggcttttatgacggcgttattttccaccgcgtgattccgggctttgtgagccaaggcggagatccgactgggacaggcatgggcggaagcggaaaaacgatcaaatgtgaaacagaaggcaatccgcataaacacgaagccggttctttatcaatggcgcatgccggtaaagacacgggttcaagccaattcttcatcgtacatgagccgcagccgcatttaaacggcgttcatactgtattcggaaaagtgacaagcggtttagagcatgcgaaaaacatgtctaacggagacaaaatgaaagaaatccgtgtagaaggataatgacaaaaaacccgcctttttcaggcgggtttttttatgtatatgaaaattctcatgtgtaaatcatgaaaaaatacatatatgaacatcagcgatcattctggtatagtgaaaaagaccgattacaacaatgaaaagaggtagaaacgttggttcaattggcaaccgttttatttgtcattatcattctcgcacttatgatttggttcagggtgaaaaagggaaacaggccgattaaaggcggcggcttcggcatcattctcccgctattgattatcgccgtcatttttacattcagcatcagccagctcatgaatatcccgggaaagccgtttcattttcccgctctttgggagctcgccatcgccggactgttaggcgcggtattcggcgtcatcatgctgtcgcaaaccgcctatgaaatccgggaagacggctttgtctactccaagcggaataaaaactttaaatatgtcattatcgcgattattgcgatccgtatcgtgctcagccaatatttcaaaaacattgacgcggcggaattcgccgttttaacgatggaacttgcttttgtgtatttgtgcatttggcggatcggaagcttcgtgaaataccgtaaaatcagcagatccggcttataaaatgaaaaaaatggatgaggtgcggggcttatttgccctctgtgcagggattcatggtaaaataaaaacgaccatggctaatgggaggaaatcacttgaaatcagaaaaagaaaaaacttctaaaaaaagcgccgtacttgattgggcgaaagccattatcatcgctgtcgttctggcactgctcatccgaaactttttatttgccccttatctcgttgatggaagatcaatggatccgacgctgcatgaccgcgagagaatctttgtcaatatgacggtcaaatacataagcgacttcaaacgcggccagatcgtcgtgctgaacggagaaaacgagcactatgtcaaacggattatcggacttcccggcgacacggtgcaaatgaaaaacgatcagctgtacatcaacggcaaaaaagtgtccgaaccgtatttagcggcaaacaagcacaaggcgaagcaagaaggctatgaccggctgacagaagacttcggcccggtgaaggtgccggacgacaaatatttcgtcatgggtgataaccgcagagaatctatggacagccgcaacggcctcggtctctttacgaaaaaacaaatagcgggcacatcaaaattcgtcttcttcccgtttaacgaaattcgcaagacgaaataaaccgtacaggcagttttcttcatgaggaaaactgctttttttatataaatttatctttccaccctcaaaaacagaacataaattcgtatatctatttaatagatagaaagttttacagatacatgaaacatcttccctttatgaaacgttatatgaataactcacgcagggaagaacggttttctattcatgaaaaaaaggaatatgacatagtaatgaatagattgatacgggctggaggtagaaaaatgggaagaattaaaacaaaagcagccattttacttgtactgctgctgttattagcgggcggttatatggtcataaacgatattgaactgaaagacgtgccgactgcaatcggacaaaccctgtcccaggaaaaagaagaatatacagtcaaaacatataaaattacgaaaatcgaaggaactgagtaccacggtacggcagaaaacggcacaaaaattatttttaacggcgacaagctgaagcaggatctctccgatgtgaaaaagggagataagattaaagcgtatttcagcaaatcaaaccggattgacggcttattgaaggtcgtcaaagtgaacgaataaataaaggcaccttttatgggaaaagggcgctttttatttttctgaataattaggtgcaaattcattgcgcctgccgcaaaggatgttataatagcggataaggacaaaaaaatattgattgtatccttcggggctgggtgaaaatcccgaccggcggtaataaggcgttttgcgctttacagcccgtgacccgtatgcatctgtatacggtggattcagtgaaaagctgaagccgacagtgaaagtctggatgggagaaggatgagagaagctatgcaaaaaataaacttactgtatagtcttatttcctatggattaaaactggcaaagccccgaactgtgtaaacattcggggcttttttgacgccaaattgcgtggaagaagggagggataacgatggaagaatattatatgaatacggcaatagaacttgccagacgcggtgaaggacagacacagtccaatcctcttgtcggcgctgtcgtcgtcaaaaacggacagatcgtcggaatgggcgcccatttgcaatacggagaagcgcatgccgaggttcacgcgattcatatggccggcagacacgcaaaaggcgccgatttgtatgtgacgctggagccttgcagccattacggaaaaacaccgccatgcgccgaactgataataaagtcggggataaaaagggtgtttatcgctgtgaaagatccgaatccgcttgtagccggaaaaggcatcggaatgctggaagcagcgggcatcgaagtgaaaaccggacttctcaggcagcaggcagaagagctgaataaaatgtttcttcacttcatgcggaccggacttccgtatgtcaccttgaaagcggccgcgagccttgacgggaaaacagcgactgaaaccggtgacagcaaatggattacatcagaggcggcaaggcttgatgcccagcaatacaggaaatcgcatcaaagcattcttgtcggagcaggcacagtcaaagccgataatccgagcctgacctgcaggcttcctgatgcggtgaagcagccggtcagagtgattctcgatacaaagctgaccattcctgaaacggcaaatgtgctcactgacggcgctgcgccgacatggatatttacggccaaaggtgcagacgtgcaaaagaaagaccggctgaccgcactcggaataaaagttattccgctggaaacagaccgcattcacgtccctgaggtgctcagtattctcgctgaaaacggcataatgtcggtttatgtggaaggcggagcatccgtacacggaagttttgtcaaggaaggctgtttccaagagcttcatttctatttcgcccctaaattaatcggaggaacgcttgctcccagcttgatctccggtgaaggttttcaatcaatgaaagatgtcccccatttacaattcacacaaatcacccaaatcgggccggatataaaactgacggccatacctaaagatggaaaggatggtgacgatgtttacaggaatcgttgaagaaacaggcacgatccaagcaatcaaaaagacaggcctttccatggcattaaccatcgccgcttcaaaagtgacaagtgatgtgaaacttggcgacagcattgcggtaaacggcatctgcctgaccgtaaccggattttctgacaatcaatttacggttgatgtcatgccggaaacagtgaaagccacttcgctgaacggcttgtcaaaaggcagtaaagtaaacttggaaagagcgatgtccgccaacgggcggttcggcggccactttgtatcagggcacgtggacggaacggcggaaattacgcggatcgagaaaaaaagcaacgcggtctattacgatttaaaactttcgccggaactgacaaaagcgctcgtattgaaaggttcaattacggtagacggcgtgagcctgacgattttcggtttatcagacgaaagcgtgacggtatccatcattccgcataccatctcagaaacgatttttcagacgaaaacagtcggatcgaccgtaaatattgagtgtgacatgatcggcaaatacttataccgctttttgcacaaaacagaacaaacgaaaagcaatcaaactatcacggaagcctttttaagcgagaacggcttttagaaaggaagatcgatatgtttcatccgatagaagaggcgttagaggcgctgaaaaaaggtgaagtcatcattgttgtcgatgatgaagacagagaaaacgaaggagatttcgtagcgctggctgagcatgccacgccggaagtggtgaattttatggcgacccatgggagaggcctgatctgcacgccgctgtctgaagacatcgccggccggctggatcttcacccgatggtcgatcataatacggactcacatgagaccgcgtttacggtcagtattgaccacaggctgacaaaaacgggcatcagcgcgcaggaacgatcctttaccattcaggcgctgttgaacgaagaatctgtgtctgacgattttcagcgtccgggccacattttccccttaatcgcaaaaaaaggaggcgtcctgaagcgggccggccatacggaagcagccgttgaccttgcaaaagcctgcggatctcagggagcgggcgtcatttgtgaaattatgaatgaagacggcactatggccagagtgccggagttagccgaaatcgccgaacgccaccagctgaaaatgattacgataaaagacttaatagagtaccgttacaacattacgacccttgtgaacagagaagttgatattacgctgccgactgacttcggcacgtttagagtttacggatatacaaacgaggttgacggaaaagaacatctcgcctttgtcatgggggatgtcccgtttaacagcgaacccgttcttgtcagagtgcactcagaatgcctgacgggcgatgtgtttgcatcccatcgctgtgattgcggacctcagcttcatgccgcgcttgcgcaaattgctgaagaaggccgcggcgttctattgtatttgcgccaggaaggcagagggatcggtttaatcaataagctgaaggcgtaccgattgcaggaacaagggtatgacacggttgaagcgaacgaagcgctcggctttctgcctgatctgcgcaactacggcatcggcgcccagattctccgcgacttaggggttcagcatatgaaacttttaaccaataacccccggaagatcgccggcctcgaaggatacggtctcagcatttcagaacgggtgccgcttcaaatggaagcgagtgagcataacaagcaatatttaaagaccaaaatgaaaaaacttggacatctgcttcatttctaaaaacaaatctcacaaaaaaggatggataacatatgaatatcatacaaggaaacctagtaggaacaggacttaaaatcggaatcgtcgtcggcagatttaatgaatttattacgagcaagctgttaagcggagcggaagacacgttgcttcgccacggtgtagaatcaaacgacattgacgtcgcttgggtgccgggagcgtttgaaatcccgtttgcggcaaagaaaatggcggaaacgaaaaaatacgatgccgtcattacgctcggcacggttatcagaggagcgacaacgcattatgactatgtctgcaatgaagcggcaaaaggcattgcccaggcgggaacggcgacgggcgtcccggttatcttcggcatcgtgacgactgaaaccattgagcaggccatcgaacgagccggaacaaaagccggaaataagggagcggattgcgcagtatctgccattgaaatggcaaatttaaaccgttcatttgaataatttgttgaaaagcgtttaaaacagcggcgaaaatgatataatgtgaggaaacggatcgcctttatgtatccgtttgataggacatgaatggacattttggatatagaggggtttttatgttaattcgttataaaaaatcgtttgaaaagattgcgatgggtcttctgtcatttatgccgaatgaaaaagatctcaagcagcttcagcagacaataaaggactatgaaacggatactggccgccagctctttctttggaaagaggatgaagatatcgtcggagcgatcggagtcgaaaaaaaggactcagaagttgaaatccggcatatcagcgtgaatccttctcaccgccatcaaggaatcggaaagcaaatgatggacgccttaaaacgtctgttcaaaacggaggcactcgttccgaatgaattaacgcaaagcttttttgaacgctgtcaacatcaaaaagatcaggatatctcatataataactgacaaatgctcccggaatcttcacggtttcgggagctgttttgatatagaaaaagcagggctgaccgtcagcctctgcttttttttcttctctcaatttcccgttcgcgttccttaatgacatccgtcctgtcccgcaggcggtgtttatgaataagaaaggtatctgatacgccgtcttgcccccatgtatagccctttcggcggcattcggcaagacatgcttctttcagggcttcatctgtaatcggcagcataacacttctgtaaggcacgcccgcttctatatcgtctgacagcgtttctatcagctcaatcagcttcgggtggctgagaccgagagaacagaccgcctgcttttcagaccggagaatacgtaagctgttggcaatcagccgtttcgccccggcttcatttcccctgcgctggtgatacagagcgacggcaagctgaatcaggccgacccaatgaatgctccgcttttcagccgggctttctttccaatattcctctaacagttcatgacactcaaaataatctcttgatgcgtgaaattcggccaaaaagccgatataagctttaggatacaagccgcttcctccttttatgctaaaaccagtgtaccacagcgctatgaaaaggaaaaaaagagcggcttggtgtctgaagcctgaggaactagcagatgtaagatgctcctacgacaacgagcaaaataaacagaacgacaattaatgcaaaacctccgccgaaacaagctccgctcatgtgaaatcagcctccctttgtttcaagtttacacggctatcatatgtgcatccgcctttaaaggtataggcgtatatcttctttttcagtattttctaaataacggaggacgtgtataaaagtattggacgagagcatttcggtggattatactaaagggtagccagtttttccggcaatgagagtgatattgaaaatggtgagataatggtagaatatcaagtgaaaattgatacgtttgaaggcccattggacctgctgcttcatctgattaaccgtcttgaaatcgacatatacgacatacccgtggcaaccattactgaacaatatttattatatgtacatacaatgcaagagcttgaacttgatgtcgccagtgaatatctggtcatggcggcgacgcttctcagcattaaaagcagaatgctgcttccgaaacaagaggaagagctgtttgaagacgaaatgcttgaagaagaagaccctcgggacgagctgattgaaaagctgattgagtatagaaagtataaaaccgctgcgaaggatttaaaagagcgggaagaagaaagacaaaagtcatttacaaagccgccgagtgatttaagtgagtatgcaaaagaaatcaaacagacggagcagaaactgtcggtgaccgtttatgacatgatcggcgcgtttcaaaaggtgcttcagcgtaaaaaaatcacgcggccgaaagaaacgaccattacaaggcaggaaataccgattgaagacagaatgaacgaaatcgtaaaaagcttaaaaacggcggggagaagaataaacttcacggagctttttccttctcggcaaaaggaccatctcgtcgtgacgtttttagcagtcctggaactgatgaaaaatcagcagattatcattgaacaggaagaaaacttttcagatatatacattacggggagtgaatccattcatggcgcttgatatcgtgaattggaaagcgattgtggaagccctgctgtatgcggcgggtgatgaagggctgaccaaaaagcaattggtgacggtgcttgaaatagaagaagcggaactggccggaatcatggaagaagtggccgctcagtacaaggaagacgacagaggcatcgagcttaccgaatatgcggatacgtatatgcttggaacgaaaaaagaattcgtgccttatttgaaaaaactaatcgaagtgccgtcaaaagggctgtcacaggcttctttggaagtgctggcgatcgtttcgtacaagcagccgatcacacgggcggaaattgaagatatccggggcgtgaagtctgagcggattctgcacagcctcgtgtcaaaagcgctgctgtgtgaggtgggccgcgccgacggtcccggccgggcgattttatacggcacgacaccggtatttcttgaacaattcggcttaaaaacattggaggagctcccgccgcttcctgaaaatgcggaggaagacgttctccaggaggaagccgatttattctttgaaaacttcaaccaaacttttgaggatattaaataataatcgtttttcatcatacgatagtagggaaaggccattgatgaatgacgcaaatgacgacgtacaagagaggaaggaaacggacggaaatgggaaattcgattgtgagggcccatactgaagaaactggtgaatttttagccgaggttgtcacgatggtcagcagctatttaaatcatacaactttgccggagatgcgggctcaaggagaggcggatgaagcatactgccgcgacgtgctcagtgtgctgaggaggatgaccgtcttttgcgaaggcgcccaggaagcctgcaggcggcttttaatgcaggagccgtttcatgaggcgagagcggaaaaaacgctgtataaagtatatcatcagtgcgtggaggagtttttcatgccgaaaaaggatacatggtacgaaaacagccgcgccgcttatacaggccaaagcgcgattgaattctaccagcaagtgccggactcgctgcggagccttctgctttcgctcagcagtgaatttctgcgcatgcgggaagaattggcgcaatatgaagcatcaggctcaaatatggcatcagtcagataaaaactcttccttttgggagagtttttttatgtgaaagtgatgcaattggtattcataagtcatggacatgcgcataaacttgtacaaacccacaacaaggacgtgagcattcatgcgctttctcaaaaaagctgccgtatttcttttgacttttgttattcttttttccattacagacggcaatacggcacatgcccaaatacatgtcagcgcaaaaagcgcgattataatcgacggagcatctggcagggtgttattcgtcaaggatgaacatcataagcggcggattgcaagcattacgaaaatcatgacggcggtgctggcgattgaatcagggaagatggaagagaccgtgacggtttccccgaatgccgtaaaaacggaaggctcagccatttatcttcagccgggacaaaaagtaaagctgaaagatctcgtatacgggcttatgctgagatcaggaaatgacgccgctgcggcaatagcggaatatgtcggcggaagccttgacggttttgtatttttaatgaacaaaaaagccgagcaaatcgggatggaaaatacaaaatttcaaaatccgcacgggctggacgaccatgaaaatttatattcaacggcgtttgacatggcgcttttgactaaatacgcgatgaaaatcaaggaataccggaccgtttcaggcacaaaagtgtataaggcggaaacgatggaccgggtatggaaaaataaaaacaagcttctgactgggctctaccgttacagcacaggcggaaaaacgggttacacaaaaatcgcgaaacggacgctcgtctcgacggcctcaaaagacggtacggatctcatcgcggtcaccataaatgatccggatgactgggatgaccatatgaatatgtttaattatgtctttgatcactatagaacctatgtcgtcgctaaaaaaggcggcattccgaagctgaaaaagacgttttacggaaaacacgcttttattgcccgggatgtcaaatatttgttaaaagaggatgaaatcgacgatgtaaaaatcagcacaaccttaataaaaccgaaaaaagcctggaaaaaggacgcctctctcattcctgatgtcgtcggccggatgactgttatgcatgatgggaaagtgatcgccaagatccccgtctattatgaaaatgagcgccataaaaaaccgaaaaagcatttcattgagacgtttacgagcctgtttatgagcgcggcgggcggttcgtcatggtcaatttaatctgggtatgtctgacggtaatcggacttgtctttgcgatgtttaacggtaccttgcaggatgtgaatgaagccgtttttaaaggagcgaaagaagcggttacgatctcgttcggattaatgagcgttctcgtgttctggctcggcctgatgaaaatagccgagcagtccggccttttggatatattcagcagaatgtgccgcccgtttatttctaagctgtttcccgatattccccctgatcatccggcgatgggatacatcttatcaaatctcatggcaaactttttcggactgggaaatgcggcgacaccgctcggcattaaagccatggagcagatgaaaaagctgaatggaggtaagtctgaggccagccgttccatgattacctttttggcggtaaatacttcgagtattacattgataccgacaaccgtcattgccgtgcgcatggcttactcggcgaaatcaccgaccgatatcgtcgggccgaccatcttagcgactttaatttcgggaatcggcgcgattttcattgaccgctacttctggtaccgccgcaaaagaaaagggaggtaagcgaatggaaatggtgaattgggtgtctttagccatgattccgattattatcgccggtatattgatatacggcacgatcaaaaaagtgccgacgtatgaatcattcgttgaaggcggaaaagaaggaattgagattgcgttttccatcattccgtatttggtcgggatgctggtggcgattaccgtattccgggcctcgggcgcgctggattttgtcatggggctgtgcaagcctttctttacagcgctcggcattcccgcagaagtcgtgccgcttgctctgatccgcccgatttcggggacggcggcgctcggcatgacgacagatctgatcgccgtgtacgggcctgattcatttatcggcaggctggcctcggtcatgcagggatcgactgacacgacgctgtatgtcctgacggtgtatttcggggcggtcggcatcaaaaaaatgggggatgctttaaaggttggtcttcttgctgatttgatcggggtggttgcatcaatcatcatagttacgttattatttggaagcgcctgaaatcaggcgctttttatatatcagaataactctccttgaaaaagcttgtttgttcaaggggaaaaaagtaagattatacttgaggtgaacgacatggaaagactgcaaaaagttattgctcatgccggcgtggcatcacgcagaaaggcggaagagctgataaaagaaggaaaagtaaaggtgaatggaaaagtaataacagagctcggcgtaaaagtgaccggttctgatcagattgaagtaaacggattaaaggtggagcgggaagaacccgtgtactttctgctttataaaccgagaggagtgatctcagcagctgatgacgacaaagggcggaaagtggtgaccgactttttcaaagaagtgccgcagcgcatttatccgatcggcaggcttgattatgatacgagcggacttttattgctgacaaatgacggcgagtttgccaacaaactcatgcatccgaaatacgaaattgataagacgtacgtcgctaaagtgaaggggattccttccaaggaacttctgagaaagcttgagcgcggcattcagcttgaagaaggcaagacggcgccggccagagcgaaaatgctttccctggacaaaagaaagcagacgagcatcattcagctgacgattcatgaaggccggaacagacaggtccgccgcatgttcgaggcgatcggtcatgacgtgctgaaactaaaacgtgaagaatacgcatttttagatttaagaggcctgcgcacaggagacgcaagagaattgtcgccgcatgaggtgaaaaggctgcgggctttagctgaacacggtaaaaacgctttctaattttcacataaccttcaaaaattacaaaacgtgttgatgatataattgaatggatttgcaggcaggggaggggagcagtgtacaatgaacaaaaaacggcggcgtttattcattcggaccggcatccttctcatcttactctgcgcgctcggatataccatctataatgccgtatacacaaacggtgagcgtatatctgaggggtccaaagccccgaatttcgcgctgaaagatacagagggcagactcatagaactgagtcagttaaaaggaaaaggtgtttttctgaatttctggggaacgtggtgtgagccgtgcaagcaggaatttccctacatggagaatcaatacaagcattttaaagacctcggtgtcgaggtggttgcggtaaatgtcggcgaatcaaaaattgcagtacataattttatgaaaacatacggcgtcaatttcccggttgcgctcgatactgaccggcaagtgctggacgcgtacggcgtatcacctattccgacgacatttttgatcaatcccgacggaaaagtcgtgaaagtggtgaccggcacgatgacagaacgcatggttcatgactatatgaatttaattaagccggaggcgtcttcatgaaaaaggtcaaatgtgaatgcgggcacgtgaatccagccgggacggttttgtgcgagtcgtgcgggaagccgcttgatgatcaaaaatcgccgcttgccgatatgcggtacgacggcagcgcaaggcgttcgcaaacatataataaaacaatcgtagataaggtatggaacttcttttcttccgtaaaagtcggaatatggctgatcgtcattactctggcggcgtctgctttcggcacggtttttccgcaggaagcttatctgccgccgggcgcccagccggatacatattatgaacagcagtacggcataatcggccaaatgtattatctgttgggatttcatcacctgtacggctcatggtggtatatgctcctgatcgcatctattggcatatcactggtcatctgcagcctggatcgggtgattcctttgtacagggcgctgaaaaatcaaggagttcggcggaatccggtctttttgaagaggcagcgtctatacagccggacagaaaccgagctgagcggggatgcggctgatagcctcagaacacgattgaaaaaaaagcattatagagtgcgagaacaagagggcagcattctggcggaaaaaggccgtttttcaaggtgggggccctacgtcaatcatatcggcctgatcatttttctgatcggagccatgctgagatttgtacccggtatgtatgtcgatgaaacgctctgggtccgtgaaggcgaaaccgcccagatcccaggtactgacggcaaatattacttaaaaaacaaccggttcacgatgcagacatataacaaagacactgagaaaaaagtattcgccgacgccattgacagagccggaaacggcaaagtcgccaaatccttcacaacggacgcggttttgtataagagggaaggcgacattgtattcggtgaaaagccgaagcttaaaagagtcaaagaaaacaatatccgcgtcaatgaaccgctgcgctttgactcctattctgtgtatcaggtggactataaagaaaaccagctcgatcagatggtatttcacctgatcgaccaaaaaacaaaacagtcattcggcaaactgaagatcaatcttctcgatcccgacacggactatgatcttggtaacggttacaaagtgcagatcgccagttatcttcctgatttttattttaacaaggacggagaaccgagcacgaaaacgaaggttcctaacaatccggcttttgtctttaaaatcacggctcctgacaagccgaaaggggagaaaagttttgttgcgattcagcagactgttgaaggttccgaaagtaacaagtacaaattaaaattcgaccatgtggaaacgaaaaacattacaggactcaccgtcagaaaagacttaaccttatgggtgcttgccgtcggcggcgcgatctttatgatcggcgtcattcaaggaatgtactggcagcacagaaggatctggatcaaaacaggtgatcatgaagtgcttgtggcgggacatacgaacaaaaactggttcggtctgaaaaaggatatcgaatttgttcttagcgggaccgggattcaagagccggccgatcaaaaagaattggccaaaaatcaggcctagtgaaaaaggagtggtgtcatggcggagctgagcgcaaattttctttatgctgcctttttgatttatttaattgccgtcccggttttcggcggcgccatccggggaacaaaaggtgctaaggacggtaagggccgctggtcggctatcggaatcacgttaaccattttcggatttctttgtcatctcggctacttcattgcgagatggtcggcaagcggacatgcgcctgtcagcaatatgtttgaatttacgacgtcattcggcatgatgcttgttctcgcttttattattatttactttatttacagactgccttcattaggcatgttcacattgtctatcgcgcttttgcttatcgcatatgcaagcatgtttccgacagacatcacgccgcttattccgtcactgcagagcaattggctgtacattcacgtcacgacggcggcgctcgggcaggcgattcttgcgatcagttttgtagccggcgtcattttcctgttaaagcatgtcgaccaatccagaccgggcaaaaaaacgttctggcttgaagtcatcatgtttatactcgtgacgaccgtggcatttatcgccgtcacgtcggcattccggctggcggactacaaagctgaatttaattgggtggataaaaaagaagccaaaagcgtcatgatatatgatatgcctgcgcttgtcggcccgcatgagggagaactgcttacggaaggcgcaatgaagccgcttattgagcttccagccattttttcaggcagaaaggtcaatacggtgatctggtcgtttggcgcaggtctcgttttatacggtgcgctcaggctgatattcagaaagagaatcagcgctcttatcagcccgctcgtcaaaaatgtgaatctggacttggtcgatgaagtcggctaccgcgctgtttccatcggttttccggtattcacactcggcgcgcttgtgtttgcgatgatttgggcgcagcttgcatggacgcgtttttggggctgggacccgaaggaagtatgggcgctgatcacctttttattttacgcagcgtatttgcacttgcggctgtcaagaggctggcatggcgaaaagtccgcgtggcttgccgtcatcggcttcgccattattatgtttaacttaatttttgtgaatctcgtgcttgccggacttcattcgtacgcatagatgcaaaaagccgatacagttctcaagctgccgcacagtttgttaaaatgaaagtaacagaaggaaagcagggggaaaacgatggatcaaacaaatgaaactaaaatattagtagtagatgatgaagccagaattcgacgccttttaagaatgtaccttgaacgggaaaactatgtgattgaagaagcggaaaacggcgacgaggccattaaaatggggctggcatcagattatgatctggtgctcttggatttaatgatgccgggaacggacggaatcgaagtatgccggcagctcagagaaaaaaaagcgacgccgattatcatgctgacggcaaaaggggaagaagccaaccgcgtccaggggtttgaagcgggtacggacgattatatcgtcaagcctttcagcccgagagaagtggtgcttcgggtaaaggcgcttttaagaagggcttcccaaacatcttatctgacagccaataccccgacaaaaaatgtgctcgtcttttcgcatctatccattgatcacgatgctcacagggtgactgcggacggcacggaggtgagcctgacgccgaaggaatatgaactgctgtacttcctggcgaaaacaccggacaaagtgtacgacagggaaaagcttttaaaagaagtgtggcagtatgaatttttcggagacctcagaacggtggacacccatgtcaaacggctccgtgaaaaattaaataaagtgtccccgggagcggcgaaaaaaatcgtcaccgtatggggagtcggatacaaatttgaggtaggcgctgaatgaagttttggaaaagcgtagtaggaaagctttggtttaccattctttcactcgtgttaattgttttatttattttaacggtgctgcttctggaatttatagaaaattaccacgttgaagaagcggaaaaagatttaacgcagcttgccgacaaaattgcggtcataatagaaaatcatgaagaccagccgcttgccagatccatcacgtgggaactggcggacaatttaacgagcatcgcgatcattcaggatgataagcatgtctggtattcgcccaatgacgataatcatttatcctctattacattagagcagatcaaacatgaccgggatctgcacaaggcgctgacagaccgcaaaaaagtaagcaaacgcgcggtccccaacaatgccggttcggataacgaacggctgatcgtcggagtgccgtatgaaaaagacggcaaaaaaggcatggtctttttatcccaatcgctgcttgccgtcaaagatacgacgaaacatacgacacgctatatttttcttgcggcgggcattgccatcgtcttgacaacgtttttcgcgttctttttatccagcagggtgacatatccccttcggaaaatgcgggaaggcgcccaagacttggcgaaaggaaagtttgatacaaaaattccgattctgacccaagatgaaatcggggaactggccattgcctttaatcagatgggacggcagctcaatttccatattaacgcgctgaatcaggaaaaagaacagctgtccaatattttaagcagtatggcagacggggtcatcaccattaatatcgacggcaccattttggtgaccaacccgccggccgaacgttttctgcaggcatggtattatgagcagaacatgaacattaaagaaggagacaaccttccccctgaagcaaaagagctatttcaaaatgcagtgaacacggaaaaagagcaaatgattgaaatgacgcttcaaggaaggtcatgggttttattgatgtcgcctctttatgcggaatcacacgtccgcggcgccgtggccgtgctccgtgatatgaccgaagagcgcaggctggataaattgcgtgaagacttcattgccaatgtcagtcatgagctcagaaccccgatttctatgctgcagggatacagcgaagcaatagtggacgacattgcaagcaccgaagaggagaaaaaagaaatcgcgcagatcatttatgatgaatctcttcgcatgggccggctcgtcaatgatttgctggatttggccagaatggaatccggacatacgggcctgcactatgaaacggtaaacctgcatgaatttctggagaagatctcccgcaaattttccggggtagcgaaggaaaaaggcgtttcgctcacagaggacatctcagtgtctcagccggagtgtgtctttgatgaagacaaaatggaacaggtgtttaccaaccttatagataatgcgctgcgccatacggagtcaggcggaagcgttcatatcgcggctcagaccgtaaaagacggactgaagatcgatatcaaagattccggctctggaataccggaagaggacctgccttttatttttgaacgtttttataaagcggacaaagcaagaacaagaggcagggcgggaaccggactcgggctcgccatcgtaaaaaatatcgtggaagcccacggcggctcaattgcggttcacagcagcatcgacaaagggacgacgtttacattttatattccgacaaaagtgcaggatgacgtctgaaattgacgaacaatcttgttccatacgaaacacccgcatgttctgcgggtgttttttatttgtttctcctttaaaaatttaagaatatgttaatataaattcccttccaaattccagtttctcgtaatatagttgtaatgtaacttttcaacgcatttttacgacaaaaaagtgaacggaggggtttcccatggaagaaacctttcagatattatatgatgcataccatcaagatttatatcaatttttattttatatggtaaaagataagtcgcaggctgaagatttgacgcaggaagtgtatatccgcgtcttgaattcctatcatacatttgaaggaagaagcagtgaaaaaacatggctgttgtccatcgcacgccatgtggcgattgactggttccgcaagcagcagacgatcagacagcgtattatgggtacgtttgattgggatacacaagatgtcagagatcagcatttgcttccggacgaactcgccgtacagcatgaaaacgtccgggaaatttataccgcgcttgatcattgcactattgatcaaagagctgttattatcttgagatttattcagggatattccattcaggaaacagccgccgctctccgcttctcggaaagcaaagtcaaaacgacccaacacagagggctcaaaatacttcggaaacagatggagcttttgagggaggagctaatggatgatgaagtcatattggaacgaagaaagagtagaggagttgttaagacaacttccggcggttagagatcatcgttcacccgaggccatttaccggaatattgaaacgggtaaaccgtacaggaaaaaaccggcccgaagctggatcggccccgccgcagccggcgtctgcgcattgtgcatcgctctgattatatctcctcacctgatgacaaacaaatcttccggtgatcttaccgctgacagccgccagacagaaaaagccagtcagtcagcttctgtcaagccgccggatcagaagacgttcgtcgtctcaaaccaaaacaaaaacaattacattactttggcatttgccgattcagaaacatccgccgtcattccggtcagttttgaaaaaaagaagccggatgaatcggtttcagaggctttatccgaagcggaagacctagaagtgcccgaatccttcctgtctgtgccgaaccttttggacggtgtgcaggtaacggcggataagaaggatttgcttgtgcaggtaaacggacggctctctatcgaatcagttgccgatgctgacttattgaaaaagatgctgaaagagactttgacatggagcccttacgagcggattaaattgaaaaaggttcaaaacggagccggacaggatttttataaatcttacggcatttccgctgagatgtctgtacataaacagacaaaccgggcgtatttttcttacagcgacagtctgggacaagagtatctcatcccgtctgaacaaacctattattcagtatatcaggctattgacgggatgaagacaacagatgaaggctcacagactgcgagcattatagaagcagatgcgattgcatcggtatcggaaagggaagacggcgagcagctgcggattcaattgtccgaaaaacataaggttgaagattcgctggaagggattttaatgatcgaagggcttctgttaactgcgaaggaattcggttattctgaggtgctgttcacacatgcgcatacaaagaaaatcggtaattatgatgtgacaaaacctatcgctgtgcctgccgcgcctaatccgcttccaagccattaaacgtaaaaaaacccaaaacatatgaatgttttgggttttttgttggttacggaaggtcaatcagtttaacggaaacaatatcctgaattgaagtcagctcattgacgactttatcatctaaatgtttatcaaaagaaagcatcataatggcttctccgcctttttctttacggcctacctgcatggtagcgatattgatatcgttatcgccgaggatgcgtcctacgcgtccgattacaccggtcgtatcctggtgctggatataaacgaggtggccggcaggatttaagtcaatattaaagccgttcagttcaacgattcgttcaccgaagtgagggatatacgtagccgttaacgtaaatgtgctccggtctccggttacttttacgctgatgcagttatcatatcctgattcattggaggaaatcttctcgctgaagctgattccgcgttcttttgctacaccgccggcgttcacttcattgaccgttgagtctacacgcggttttaagaaaccggacagcaggctttttgtaataaatgaggtttcaagtttggcgatggtgccttcatattgaatcgcaacatctttgacgggttccttcatacattgtgacacgagacttccgattttatcggcaatttggtgataaggctggatttttttgaattcatctttcgtcatcgcaggcaggttgatcgctgacatgacaggcagaccttttgcaaactgcagcacttcttcagaaacctgtgcagcgacattcagctgtgcttctttcgttgaagcgcctaagtgaggtgtggcgatcaccagcggatggtcgggaagctttgattcaactggcggttccacttcaaacacgtcaagggcagcgcctgcgacatggccgctttccagcgcttccaaaagcgccgcttcatcaataatgccgcctcttgcgcagttgataagacggacgccttttttcgttttggcaatggtttctctgttaagcagtccttttgtttcctttgttaaaggcgtgtggacggtaatgatatccgcgctttcaagcacttcttcgaatgtccggctgtttacgccgattttaccggctctctcttcggttaagaaaggatcgaatacatgaaccgtcataccgaacgctctggcgcgctgggcaatctcgcttccgatccggcccagaccgacaatgcctaaagtctttccgtagagctccgccccgacaaaagccgtccggttccattctcttgattttactgagatattggcttgcggaatgtgtctcattaatgaagaaatcatcgcgaatgtatgctctgccgttgaaatggtgtttccattcggcgcgtttatcacgataaccccatgttttgtagcctcatcaatgtcgatgttgtctacgccgacaccggctctgccgacgatttttaaagaggtcatttttttaaacaattcttcggttactttcgtggcactgcggactaacagggcatcaaaggtatgtaattcatcttctgcatccgcgacgtttttttgaacaatttctataaagtctgattccatcagcggctttaagccgtcattgctcatcttatctgagaccaaaactcgaaacattgttagatttcctcctagtttagctgactaaatatctgataatttatcatattctcaatagagtgtcaatgtgtattgacgcagtaaaggagaaaaggaaaccgctgaatcagcttaaattgggcttccccaatattttatttaaatttgagcagttctctatacaattgcaatttgatcatatataatgtgaataaattcataagatcaatcttcggggcagggtgaaattccctaccggcggtgatgagcatcatgctctaagcccgcgagctgcttcggcggcaggatccggtgagattccggagccgacagtatagtctggatgggagaagatggaggttcagcagacgttttgatgcttatatcaaacgtttctttgccaagccttagtaagctcccgctttttaacaaaagcgggttttttattggggcgcaaaagaacctttcctcttttcgagagatttgatcgaaaaggagagagcattgtgaaagtagaaaaattagttgtcatcagtatgcttagcagtattgcttttgtgcttatgctgttaaatttcccgtttccggggctgccggattacttgaaaattgatttcagtgacgttcctgcaattatcgccattttggtttacgggcctgcggcgggggttgcggttgaagcgattaaaaatattctgcagtatatcattcaaggaagcatggccggcgtgcctgtcgggcaggcagccaattttatcgcgggaacgctgtttattctgccgacggcgtttatgtttaaaaagctcaattcggcaaaagggcttgcagtgagcctgctggccggaaccgcggcgatgaccgtgctgatgagtattttgaactatattcttatcctgcccgcgtatacttggtttttacattcaccggcactgtcaaacagccagttaaaaacggcggttgtcgcaggaattctgccgtttaacattgtaaaaggcgttatcatcaccattgtctttacgttcatctttacgaagctgaaaccttggattgaacaaaaacgcagcatccagacacaataaccactccaaagcgcccgctctgtaaaacacagaccgggcgcttttttgattgtttgatcacgcaaaaaaaataagactccggccgataacagccggagtcttattcaggacgaaaaagctcctctcacggggagggcttttttattcgtatttcagcgggtcgccttcgaacggttcatccgcaactttgattgaatcagtagggcatccttcaaatgcgtcaatcatatcttcttccagaacttccggaacttcgacgacgcctttattttcgtcaagcgtaacgaacgcaatgccttcatcatcataatcataaatgtctggtgccgcagctccgcaggcgccgcatgcaatacacgtatctttatctacaattgtgtactttgccatgaataaaacctcccagattgttcgtgttggaacaaatggtttaccttatatatttttaaatataacacctattcctcttacttattgtaatgatgttagtgtcaaatttcaacagaaaaatgattgagaatgcttatcacataagggattctctttagcacttccccctaaaagatgactttaaacgtcaaatttatatgaaaatctgttaaaataaaaagaaccaaaaaacgaaacttgtcacagaagaaatgtaggtgtgtttagattggcgataaactactttgataccgtggttctcgactgtctggacaaaatagacggcgaacggactccgagtgctgtgtttcatttattaaaaggaaaaaagtcgtctcaaaccattcaggatgccggcttatttcagatcgctaaatatttcggcatggcttcacattgtgaacgcggcgatattgcggcttctttgcataaactcaccgagaactcatacattacagccggaaaagaagagggaacgtggaaagtgactgcgcgcggcgttcaaaagcttgaacgggcgtttgccgagcggccttggccgaagcactgccacggcgcgaattatcaaacgcctgctgtcaccctgtggaggcggctttccctgctcattcaagtcctgtcaaacaaagagcatcaatgcagtcaatatatcccggttacaaacgatgtgcagacgctgagatgggtcaaacggttcatgcggaaaaacatagacgctaaagagctctccgtccaaatgcatgagacgctgtttcaccttctgcaaggcgtaagtgaacggcaggcgcttatttttgtctattctttaacttcattcaacagaatcggcaaaacgaataagcagcttgctctccagttgaacgaagatgaatggtatgtgtccgtccagttttggggagcggtacattatgttattcaatcgcttccgcaatgtgcatatcccgctctgcgcgagctgttgtccgatctgcaggcggaaagcgcgctgacacagtctgccagaaaaacctttgagctgttggaaaaagggtttccgattgaacggatcgccgcggtcagaaatttaaaaaccgccacaatcgaagatcatatcgtagaaatatcattgcatcagcctgcattttttacagaacagtatctttctgaagaggaacagcgtatgataacggcatttgcaaaacagcatcaaacgaataaaattaaacggattcgcgaaggaatgcagatgcgcttcagctattttcagatcaggctggcgctggcaaagacggtgaatcagcatgactgagctgcataaagctttatccaggtattttggtttgcattcctttaaaaaagggcaggaagagattatgactagcgtgctccaaaaaaaagatacgatcgccatgcttccgaccggcgggggaaaatcattatgctatcagctcccgggttacatgatggacgggctggtgctgattatttcaccgcttctatcattaatggaagatcaggtgcagcagctgaaagcgaaaggagaaaagcgggttgctgcattaaacagcatgctgaattccgcagagcggcattttatcctcagcaacatcagccggtataaatttctctatatgtctcctgaagccctttcttcaccttatgtgctgaaccgtttgaaaaatgtcccggtcagtttatttgttattgatgaggctcattgcatatcagaatggggacatgatttcaggcctgattactcgaagctcgggcctttcaggcaggcactcggaaagccgcctgtattggcgctgaccgcaacagcgacaaaagaaacgctcagagacgtgacggatgtgctcggacttgagcatgcggtgcgtcatctttattcagtcaaccggccgaacattctcctggcggcagaacatttggctgataataccgaaaaaataagcaggctcacggagcttgccgaaaagcttgaaggcccgggtatcatatattgtccgaccagaaaatgggcggaagagcttgcggctgagctgaacgaaaaaacgggaaagcggacggattattatcacggcggaatggatacaggcgacaggattttaatccagcagcaatttatccataaccagcttgattgcatttgctgcaccaatgcgttcggcatgggtgtggataagtcagatatccgctttgtcattcacttttatcctccccaaacggccgaggcctttatgcaggaaatcggcagagcgggacgcgacggcagcccgagtgtcagtattttgctgagggcgcccggcgataccgagcttcagcagcagattattcagacagaaagcctgtctgattatgacctggaaggcattctggccgtcatacgggatgccggtacgggtgatgaacgaaagcttcgggacgttctgatcaataagggagtccaggaaacacaggcgcgaacggccgtccatctgtttctgcaaggaaaaaccacaaaagaccagctgcgggaagaactgacataccgtgtggaaaagaagctgcgtaaaatgaatcgtttttcggcgttattagagcggaaagaatgtataagagaagcgctgctgtcttattttgatgaaccgtatgagcctgatggtcaaaccggacaatgctgcagcagctgcggacttgatctggctccgtacgagcaaaaaggagaacgtaaaaatatggaacggttagaagattggaagctggaattaggccggattttcggatcagagtctgcgggtgagttcagctgagacggcaaagcgaattgatccggcagctctcagaccgggagattgtgatgcagctgtacgccacccaattgctcatattggcggtttcagctgttatcggctttttcttttttaccgacattcacgattttttaaagctgtggcatatacgtgacgataatatcatatggtacggtgtaactcttgccgtccttgtcatttttgccgatctggcggtgatgaaatggtgtccttcgcatttatatgatgacggcggcattaatgtattgctttttaagaacaggccggttctgcacattttgtttttgacgcttctcatttcgttcagcgaagagattttgttcagaggcgttctgcagacacatatcggcttatgggccgccagcttcatttttaccgtgcttcatttcagatacttggcgaagtggcttctgtttatgatggttgcgggcatcagtcttttgctggggcttatctatgaatggaccggcaatttattcgttccggttacagcgcattttattattgatgcggtatttgcctgtcagatccgttttcaatatgttaggaggggtttgcatgacggaaatgtcaagagttgaaagaagaaaagctcagctgcgtgccgagcagcaggttgccgcggccgcggatgaacaaattgaatatcttgaagacagcctcccgacaagacaatctgtaaaagaggagcgtaaaaaaaaggaagagcaggtgaaggaaaaaaccaaaacaaaaacgccgctgttcacttttctgaccgtcctgttcattatcgtaacaatcggtgtctttttcggtcttctttatatgacgaacagcagcagatttgacccgaaggactatgaagatgtcttcatagaccacagtgaaagcgcgcctgccgttattccgaaaggcgctcagaaagaaacgtcagaaaccgctcttttagaacaaccgaaaaaaaagtctgacgacaaagataagaaagaagcggctgcacctgaaaaaacgaaagaaaaaccaattgaaaaaccaagtgaaaaaacacctgaaaaaacggaaacgccctcagaaaaacaagtaaagccgacagacaccgattacgcggagacaaaacagcagtctccgccggctgtccgtgaaaaagcggctccggctgaggcgagtgatcaagccgggactgtcccaaaaaaagtgcggaccgtacagcatactgtacagccgaaagaaacgctttaccgcatttcaatgaaatattataaaagccgggcgggcgaagaaaaaatccgcagctacaacggattaaacggaaacgacgtgtacaccggccaggttctgaacattccgctgtctgattaaaataaatgcatgttttcaccgcgtttttcatatagtgtaccaatgaaaacggacaaggtgtgaagcgcatggattctttatggaagcaattagaccgatttgctgacggaccgacgaaacaaatgcttcaggcgctggtgaaacggaaattaaaatacgaaaattatgccgcacaatgccgaagatggcagtgggcgtccctcgtttgtttttccctgatgtgcatactgctgatgtttaaaagctttaatgccccccaagcctctccgcagctgattctgcaggaaatattaggccatacggtttacttgtgctggattatggcttccgcttttgcgtattgcacttcttattatttcaaaaaaaaggaagaaaaagctgagggtgaatttcataaactgaggtgtgaaattatccaaaaaagcacggatttatggccccagcctgaaaaatggagggcgagagaatctgtttttcacttgatgaaacatcggtatgatatcaatctttattttgaaagcaaataaaatgaggcgttttccggaaaggatagaaacgtctttttttgtttgtccgtctaatataagacaatgacagaatggagagtgcgtttatgaagcttacagcgggaattctcggctcattggcgggagcggctgcggttatggcggccgttatgtacaaaacggcaaacggcagccatctgaaaacacatacatttacgcttgataaaatgaaggggatgaagccgctcaccatcttttttatatctgacgtgcaccgccgtttaattgatgaaaagcttctccgcgaagcggcaggttataagccggatgccgttttgctcggcggtgatttggcggagggcggagttccttacgccagaattgaagaaaacatcaaacgtctgacggctcttgcgcctgtcatgtatgtgtggggaaataatgattacgaggtcagccagcaaaaactgctctctcttttacgggcatataaagtgatcccgctgagaaatgaatcggttcagtttgcttataaaggggaaaccgttacgatctgcggcgtggatgatatcaggatgatgatggatgattacgatgctgcaatcagatatacggatgctgacaaagtaaacctcctgctttgccataaccccgacatccatgagcagatgagggagtcagacgggattgacgctgtgttcagcggccatacgcatggcggccaaatccgtttcggccggttcgggccgtacgaattgggcgggacgggaacggtaaaaaaagcgcattacctgatcagcaacggctacgggacgacaaaagttccgctgaggctcggggcgaaaccggagacgcatatgattacgctgtgcggaccggatgagccgtcttcctgaaacaaacccggccgcggtgataaaaaacggcattctgcttgtcttcccgctgtacacggtgtaaactgataacaaattaagaacctatgactcatttattcatatactgtgttatatgatttgtgtgcaagaagaggcaggagggaacattatgcggcttgagcgtctgaactataataagattaaaatctttttaaccctcgacgatctgactgatcggggactgacaaaagaagacctctggaaggactcgtttaaagtccaccagttatttaaagatatgatgaatgaagcaaatacagagctcggctttgaagcgaatggtccgatcgcggtggaagtatattctcttcaggcacaaggcatggttgtgattgtaacgaaaaatcatgacgcggacgcagaagatgacgaatatgacgatgattatatcgagatgcaggtcaaacttgacgaaagcccggatattatttatcagttccattcgtttgaagatatcattcagcttgccggaagccttcaccgaatcgggattaccggcggcaccgtctaccactatgagaaccaatactatgtaagccttgaagacctcggctcccgttccgccgaaggcgtcatcgcggtgctggctgaatacggacacccggcgacgattacgatttacaggctccatgagtacggaaaactcatcatggacggcaatgctgtggagaccatccagaaacatttttcataaaaaagatttgaaacggcagctgttttcagcggccgtctttttttaagcgaaataatggaaaaatcattgtctttcttctatgcacggagatattgaaggtgtatactagtcactgaaagggagcatgagagaaacagaagattttaggaggttaactcaaatggcagccgatcgattcaccggtcataatgaagaagacaaacatgatgtattaaaatcaacccaaaccgtaatacataaagctctggaaaaattggggtatccagaagaagtgtatgaactgctgaaagagccgctcagattattaacggttaaaattcctgttcggatggatgacgggtctgtgaaaatatttacaggctatcgtgcgcagcacaatgattccgtaggtccgacaaaaggcggcattcgttttcacccgaatgtaacggaaaaagaggtgaaagcactttccatctggatgagtttaaaatgcggaattattgatcttccttatggcggtggtaaaggcggaattgtttgtgatccgagaaatatgtcattcagagagcttgaaaggctgagcaggggatatgtcagagcaatcagtcagattgtcggaccgactaaagacgtcccggcacctgacgtatttacaaactcacagattatggcttggatgatggatgaatattcaagaattgatgaatttaactcacccggctttattacgggaaaaccgcttgtactcggcggatcccacggcagggaatcagcgacggcaaaaggcgttaccatctgcataaaagaagcggccaagaaaaaaggtctcgatattcagaacgcgcgcgtcgtcgtacaaggtttcggaaacgcgggcagctatctggccaagtttatgcatgacgccggcgcgaaagttgtcggaatttctgacgcgtacggaggcctttacgatccggacggtcttgatattgattatctgcttgaccgcagagacagcttcggaacggtgacgaagcttttcaatgacaccattacgaatcaggagctgcttgagctggactgtgatatacttgtcccggcggcgatcgaaaaccaaattacagaagagaacgctgaccgcatcaaagcgaaaatcgttgtagaagcggcaaacggaccgacgacactggaaggaacgaaaatcctgacagacaaaggaacgctgctggttcccgatgttctggcgagcgccggcggtgtaacggtttcttatttcgaatgggttcaaaacaaccaaggcttctactggagtgaagaagaagtcgaggaaaaactggaaaatatgatgataaaatcgtttaataatatttatgaaatgtcccaaaaccgccggattgacatgaggcttgcggcttacatggtcggcgtgcggaaaatggcggaggcttcgcgtttcagaggctggatataaaccaatcgtttgcataaacaaaaaaaatctcctatgataatataggagattttttatatgagtggaaacttatgatggaaatgccaatcgcaggagttgaaggacatgacagaagaaaaagcaattataataggcggaggtccttgcggattatcggcggctatacatctgaagcaaattggcgtgaactcgcttgtgatcgaaaaagggaatgtcgtaaacagcatttataactatccgacccaccaaacttttttcagttcaagtgaaaaattggagatcggcgatgtcgcctttattacggaaaacagaaaaccggtccgcatacaggctctctcttactacagagaggttgtcagaagaaaagagctgcgcgtaaacgcctttgaaacggtggagcgcgtaacgaaacaggaagacggccgttttcttgtagaaacatcaaaagaccgctacctcactccgttttgtatcattgcgacaggatattatgatcatccgaattatatgaacataccgggtgaagggcttcctaaggtatttcattactttaaagaaggccatccttattttgataaagatgttgctgtgatcggcgggaaaaactcaagtgtggatgcggctttggaactggtgaagtccggtgcgcgcgtcacggtgctctacagaggacatgagtactccccgagcatcaagccgtggattctgcctgagtttgaggccctcgtcagaaacggcacaatccggatggaattcggcgcttgtcttgaagaagtgacggaagatgaaatcattttccgctccggccgaaatgagacggtccggctgaaaaacgatttcgtatttgccatgacgggataccatcccgatcacggtttcctcgaaaaaatcggtgtgcggattgatgcggaatcaggccggccgtttttccgggaagaaacgatggaaacaaatgttgacggtgtttttatcgccggagtcattgcggctggaaataacgccaacgaaatttttatcgagaacggccgttttcacggcggcttgatcgcaaatgaaatatcaaaacggctgggtgcagagagcatatgatcattcatatgctcttttttaaaaaaattgaaagatgtaaaaatatgaacaacatggtacgatagatataggaatataaaggaaagaggttgcctgatgtttgcaatcatctctgcaggaattgctcccggcattgcgctgttaagctatttttatttaaaagatcagtatgacaatgaacccgtacatatggtgctgaggtctttttttctcggggttgtccttgtgtttccgaccatgtttatccaatatgttcttgaaaaagagcatgtggggggaggaagctttttcgtttcgtttttgtcttcgggatttctggaagaatcggtgaaatggttcgttctgatgatcagtgtgtatccgcatgctcattttgatgagcattatgacggaatcgtttacggggccagtgtgtctttaggatttgccacgcttgaaaatattctgtatctattcggccacggtgttgagcatgctttcatcagggcgcttctgccggtctcctgccatgcgctgatcggagtgattatgggattttatctcggaaaagcccgcttttcgcagaaaaaagcccgtgtcaaatggcttgtgatttcgctggccgtgccttcatgtctgcacggttcttacgattttattcttaccgccctcaatcattgggtatattatatgctgccgtttatgctgtttttatggtggttcgggctgcgaaaggcaaaaaaagcacgctccgtcaatatgatccaagtgtgaagaaaccgcgcgtcgcgtgcggtttcttttttatgccttgacaggggataagaaggaaacgtgcataaaaataacctcgtgacagacaatacgggtacactttaaattttgcagtaggaggcttgaagagatgaagtgcaaaggagcctttatggcatgtctcattctattttctttcgccgccgctttcttcgatcatcatgaaacggttcatgcgttttcaaatcaagtgattcaaagaggcgcgacgggtgatgatgttatagaattgcaggcccgtcttcaatataacggattttataacgggaaaatcgatggtgtttacggctggaccacatactgggccgtgagaaattttcaggagaaattcggcatgaaaccggttgatggcctcgtcggcgcaaaaaccaaacaggtgctgatttcaaaatcaaaatattaccgtgaatatgtaatggagcagatccaaaaagggaatacgttcactcattatggcaacgtcccattggaaaaccaaacaaaaccgagagccggaacgcagaagccggcgggaacgaataagcctgctcaaaagccgcaaaacaatacaggcggtcagtcaaatcaaaagcaaaatacgacagcggccaatatgcctggcggtttctcaaacaacgacatcaatcttctggcacaggctgtgtacggggaagcacgcggtgagccgtttgaagggcaggttgccatcgccgcggttattttaaaccgtattaaaagcccgttatttccgaatacggtggccggcgtcattttcgaaccgctcgcgtttaccgccgttgccgacggccaaatatatatgcagccgaatgaaagagcaaaagaagcggttcttgatgcgatcaacggctgggatccttctgaaaacgcgatttattatttcaatcctgatacggcgacaagcaaatggatttggggacgtccgcagataaaaagaatcggaaaacacattttctgtgagtaaaagtacgcaaaatgaggtgttaacatgattagaggaatcattatcgctgttctcggtgtcgcgatcgccgcaaccggatactggggatataaagagcatcaggaaaaagatgcggtccttctgcatgcggaaaataattatcagagggcttttcatgaattgacgtaccatgtagatcagcttcacgacaaaatcgggacgacgcttgcgatgaacagtaaaaaatctctgtctccggcgctcattgatgtatggcgaataacatctgaagctcataacaatgtgagccagctgcccctgactctcatgccttttaataagacggaggagtttttatccaacataggagatttcagctataaaacatccgtccgggatttagatcaaaaaccgcttgataagaaagaatatacaacactgaacagcctgtacaaacaggcggagaacattcaaaaccagctccgcagcgttcagcatctcgtcatgagcaaaaatttacggtggatggatgttgagatggcgctcgcctctgacaaaaaacaaagcgataatacgatcgtcgacagctttaaaacagtcgaaaaaaatgtaggcgctttttctgaagacagcatcagccccacatttacgggagcaaatacagaacgaaaaggttttacgcatctgaaaggaaaacaaattacggaaaaagaagcggtcaaaatcgcgcaacggtttgcgcctgatcataattattcaattaaagtggtcaaaagcggcaggaagacgaatcgggacgtatacagcatccgcatgaaagacgccgacaacaagtcttttatctatatggatattacccaaaaaggcggacatccggtctatttgattcaaaaacgggccgtgaagaaacaaaagatcagcctcaatgaagcatctaaccgggccgtcgcgtttttaaagaaaaatggatatgaaacaaaaggcctcgaaattgatgaaagcgcgcaatataataacatcggcgtcttttcttttatccccgtggagaaaaatgtccgcatttatccggaagccatccgaatgaaagtggcgctggatgatggtgaagtcgtcggtttttccgcgcgtgattacctggcggcgcaccgcacgagaacgattccggctcccgctttgtcagctgatgaagcgaaagcgaagctgaataaaaatgttgaagtgcgggagacccggcaggcgctgatcacgaatgagctcggtcaggaagtgctttgctacgaaatgctcgggacgatcgggaaagacacatatcaaatgttcattaatgcggacgacggaaaagaggaaaaaatagaaaagttaaaaagtgcagaacctatatataaagacctataaaaataaaggaggaaaggactaaaagtcttttcctttttttcgttacatgctttaataaaagcataaataatgaaagagtgaaggcccatgatagctgtcggagattatatttggattgaatacatagagaacaatgagcccaaaaaagcgaggagcaaagcagtaagcgttgaaaacggcgaactgcacatctcatatcccgtcgatctggattcgggacggacggtctttttgcataaaggattggaaataacagcggaatttatggggaatggccacgtaccgtatcaatttaaaagcataatcaaaggaaagaaaaaagaccccatcccgatgatcggattggacatcccccctcaggaggaaatgaagcggattcaaagacgccgatacgtccgtgcagacgcagtattggatgtatccgtcaaaatggaagcgaaaaaaaccgctttccatacggtttcctctaatatcagcgccggcggaatcgctgttgtgatgcctgagcatatttccgcggaaccaggtgaaaagctgtatgtctcattttctcttcccggcaaggaaaatacagccgatattacggccgaggctgttacccagcggattttttatgatgaaaaggcggataaacaaaaaatgacgcttgaatttgcagaaatcgatcccgcttcacagcagcttttactccaatattgtatgcgcgcgcagctgcagcagagaagaaacagtctgtcggaataaacagcagcgcacttttccatactaatcctaatggaggtgcgcgtgtatgaaaacgtttgaacgtctgctggtcaaattggtctgcattcagcttatcattttgggcgcggtgcaatttttgcttcattatcagcctattgaaccttatatttcgaaagctgtgaaatatgagggagttgataaaatggagaaaaaagaatggattgaaacggtaaagcggtaaatcagctcaattttttcgccccttttccggcagttcatgatacaatccatagaggagaaaagagcaaggagagagattatggacaagaaattatcaattgcgatcgacgggccggccgctgccggaaaaagcaccgttgctaaaatagtggctgagaaaaaatcatatgtgtacattgatacaggagcgatgtatcgtgccattacatatacggcgctcaagcagaatgccgatttaactgatgaagccgcgcttacagagctgctgaagcgtacggaaattgagcttgtatccgctccggaaggacaaatcgttctggtaaacggagaagatgtgacagaagaaatccgaaaagacgaagtcagcaaccaagtatcaatcgccgccaagcataaaggcgtcagagaagaaatggtcaaaagacagcagcagctcggacaaaaaggcggtgtcgtcatggacggccgtgatatcggtactcacgtgctgcctgatgccgaagtgaaaatttttctgctcgcgtccgtagaggaaagagcgaagcgccgatatgaagagaataagaaaaaaggctatgacgtgaattacgagacgctcattgaagaaattgccagacgcgacaaactcgattcagagagggaagtttccccgctgcgcaaagcggaagacgcgattgaaatcgatacgacgtcactcagcattgccgaagtcgcaggaaaaattctggagatcgtcgaacagaaatcacgttaacttcgggtggagcgctttataatttttttcgaagacaagatgttattgcttgacaaaccagtccatttattagaagttaatactaataaaactttttattgatcattcaaaatcttttttggatgattctttaatacatattcggctgaaaagcggacattcacatgttcagctttcaaaccgtattaattaagctgtgtaggtttggaccaaggaggttattcaaatgacagaggaaatgaatcaaattgatgttcaagtgccagaggttggagatgtagtaaaagggattgtgacaaaggtagaggacaagcatgtagatgtcgaaattgtcaatgtcaaacagtccggaatcattccaatcagtgaattatcaagtcttcatgtagagaaagcatcggatgtcgtaaaagttgacgacgagcttgacctgaaagtaacaaaagtggaagacgatgctttgattttatctaaacgtgccgttgatgctgaccgcgcttgggaagaccttgaaaaaaaattcgacacaaaagaagtgtttgaagctgaagtgaaagatgtggtgaaaggcggtctcgtcgttgatatcggcgttcgcggcttcattcccgcatcacttgtcgaagctcatttcgtcgaggatttcactgactataaagggaaaaccctctctcttatcgtcgttgaactcgaccgtgataaaaaccgggtgattctgtcacaccgggctgtagtggaaaaagaacagacagccaaaaagcatgattttctccaaacgcttgaggttggaagcgtgcttgaaggaaaagtgcagcgtctgactgatttcggcgcatttgtcgacatcggcggaattgacgggcttgttcatatttcgcagctgtctcattcacacgtcgaaaaaccgtctgacgtggtggaagaaggtcaggacgtaaaagtgaaagtactgtccgtagaccgcgataacgaacgtatttctttatctattaaagaaacgctgccgggaccttggagccagatcggcgaaaaggtaaaacagggagatgtgcttgaaggaaaagtgcagcgccttgtaagcttcggcgccttcgttgaaattcttccgggcgtggaaggacttgtgcacatttcgcaaatttccaataaacatatcggaacgccgcatgaagtgcttgaagaaggacagactgttaaagtgaaagtgcttgacgtgaacgaaagcgaagagcgcatttccttaagcatgcgtgagcttgaagaagcgccgaaagccgatcaggaggacttccgccaataccaggcgaaagaagagccgagcaccggcttccagcttggcgatttaatcggagacaagcttaataaattaaaataaattggtgataaaacgtgacacgagcagaacgaaaaagagaacatataaatcatgcgctgtctaccggccaaaaccgggaaacggggcttgatgatattacgtttgttcatgtcagcctaccgaacctagcattggaaaaagtggatatatcaacgaaaatcggcggactcacaagcagttcgccgatttttatcaatgcgatgacaggcggcggcggacaacttacatacgaaattaacagatcgctggcaagagccgcgcgcaaagccggcatgccgctggctgtcggttcgcaaatgtcagctttaaaagatccctccgaacggtgttcttacgagatcgtcagaaaagagaatccggatgggctggtatttgccaatttaggcagcgaggcggatgccgagcaggcgaaaagggcagttgatatgattcaagcagatgccctccagattcatttaaatgtgattcaggagatcgtcatgccagagggtgacagaagctttactggcgctctcggccgtattgagcggattgcggcggaagcgggagttcccgtttttgtcaaagaagtcggcttcggaatgagcagggaatcggcacggcagttatttgatgctggcgcagcagcagttgatgccggcggatacggaggtacgaatttctctaagattgaaaatatgcgcagagagaaggcgcttcatttttttaatacgtggggaatttccactgccgcaagcttagcggaaatccactcgctctccgctgatcaatcaattatcgcatccggcgggctgcaaagcgccctggatgtcgccaaatcgattgccctcggcgcttccggcgcgggaatggcgggcactttcctgaaagctctcacctctaaaggagaagagggcctgtttgacgagatgacggcgcttttacaagagctgaaaatgattatgaccgccctcggatgccaatcggtttcccaattgcaaaaggcgcctttggtcataaaaggtgagacacatcactggctttctgaacgggggattgacacgtcccgtttcagcagacgttaaaaggcatgcgaacccgcatgcctttttctgttttttacgattttctttttcggaattccccgttttgctcaaggcttgtcgctcctttatggtgaatcgaatcatcgcgatcagattccacccgtcgggaggctttcagttttttctcctgtctgtcttttcccatccttatccgctcctttcagtcataattggtttaaaaaatgcgttcccgctccatactggtcagaggaggagcgattatggaaccgttttattattactggtcaatgtggtttttatggatacttgcgacttttatttttgccaaaacaaaaagccgcttttacgtatcagtctttattttgactaatatgatggcaagcatacatcagattacggcttattttacgctgaacgcggcatatgtcatgttttttgctgcggcatttgtttatgcgggaagcctcggcatgcataaacggctccgtaatattgtgattcatctgacggcggctgcggcgtacggctttatttttctttttgcattatatgaccctgtttggtttatcataaaacctgaatgggcggcggttatactgcttaccgttattacgctttccgttgaggggcggttccctgagaggctttgtctttttgttctcggcatgtgccagggggagctattgtatgctgcggtcatccgcaacattgcgggtgcagcagccgtcggtgattataaatggctttcaggctgttcggcgggagtgattcttctcgtcgggctgactacatatgaacagcttgcggcgcgcatcagccaaaaaagcaaaaagcagggcaaaggagcgacaaaaatgtcttgaaaacagacggagactgttacatgaatgcgaaacattttgaagaatacattgtgatctcagtgaaaactgatataataaatgagttaagcccttctgtttgaagggttcttttcatagcgaagatgatttttaataaccggttgaacaattttttgtgaaaatgtaagcggctggattgaaaggaagggtactatgggtaaacctgtcgtagccattgtcggaagaccgaatgtgggaaaatccacaatctttaaccggattgcgggtgaaagaatttcaatagtagaagatacccccggagtgacgcgggaccggatatacagttcggcggaatggctgaattatgattttaacctgattgatacgggcggaattgatatcggagacgaaccgtttctgacacagatccgccagcaggctgaaatcgccatggacgaggctgatgtgatcatctttatggtgaacggccgtgaaggtgtgacgtctgcggatgaagaagtggcaaaaatactgtaccggacgaaaaaaccggtcgtattagccgtaaataaattagataataccgaaatgagagcgaacatctatgacttttatgcgctcggctttggagaaccgtatccgatttcgggcacacacggtttaggattgggagatttgctcgatgcttgtgccgagcattttaaaaacattccggagacgaagtacagtgatgatgtcgttcaattctgcctgatcggccgcccgaatgtcggaaaatcatcccttgtcaatgcgatgctcggcgaagagcgggttatcgtgagcaacgtagccggaacgactagagacgctgtggatacggcgttcacctacaatcagcaggaatttgtaatcgttgacacggcgggaatgagaaaaaagggtaaagtatatgaaacaacagaaaaatacagtgtgcttcgggcgttaaaagccattgaccgctcagacgtcgtcggcgttgtgctgaatgcagaagaaggcatccttgagcaggacaagcggatcgccggatacgcccatgaagccgggaaagccgtcgtcattatcgtaaacaaatgggatgccgttgataaggacgagcgcacgatgaaagaatttgaacagaatattcgggagcatttccaatttctcgattatgcgccggtgctgtttatgtcggcactgacgacaaagcggattcatacactcatgcctgcgattattaaagcgagtgaaaaccactctctccgcgtgcagacaaatgtcttaaatgatgtcatcatggatgcggtcgccatgaatccgactccgacgcacaacggctcccgtctgaaaatttactatgcgactcaagtcgctgttaagccgccgagcttcgttgtttttgtcaacgatccggaactgatgcatttttcttatgaacgctttttagaaaaccgaatccgggacgctttcggatttgaaggtacgccaattaaaatatttgcaagagcaagaaaataaaaaggtgtgatacagagatgaaaaaagtggcaatgcttggagcgggaagctggggcactgcactttctttagtgctggctgataacggacatcaagtcatgatgtggggacaccgtgccgaattgatcgatcaaatcaacgaactgcatgaaaacaaagattacctgccgggggtggagctatcaagttctatcatcggtacagctgatttaagcgaggctttaaaaggagctgacttcatcattgtggcagttccgacaaaagccattcgggaagtgctgaaaaaggctctgccgtacatcccgaaacaatcgatttttgttcatgtcagcaagggaattgagccggattcgcttctccgcatttcagaattaatggaagaggagctgcctgaggagtacagaaaagacatcgtcgtgctttcagggccgagccacgctgaggaagtcggattaagacacccgacgactgttacatcatcttcaaaaaatatcaaggctgcagaagcggttcaggatttatttatgaaccagcatttccgcgtctataccaatccggatatgatcggtgttgaaatagggggagcgttaaagaatatcatcgctcttgcagcggggattacagacggattgggatacggagataatgcaaaagcggccttaatcacccgaggtcttgctgaaatcgccagactcggcacaaagatgggcggaaatccgctcaccttttccggcctgaccggcgtaggcgatttaatcgtgacgtgtacaagcgttcattcccgaaactggcgcgccggcaacctgctcggcaaaggatacaagctggaagctgtcctggataagatggggatggttgttgaaggcgtgcggacgacgaaagctgcgtatcagctgtctcaaaaataccaagtgaaaatgccgatcacagaggcgcttcaccaagtattatttaacgggcagaaggtagaaacggccgtagaatccttaatggccagagtgaaaacccatgagatggaagacttggtcaacacattcgaaaaccgggtgaagtgacaataacatgccgtcagcatattctgaagtgacgaaagtccaaaacgcagaactctccggctgaaatcgcttaaaacatttgctgatttaggcagaagaggatgcagacgtatgcatctgcgcatactatagcatcgaagtccaagagagtgtatctcagacgtacaggtgaatatagtcaacttgactgaagcaaagtccccctctttgcttcagtttttttgttttttcaatagatggaaaacctgttgatcttttcaacatttgtatattaaaatgaaatataacgcttacaatgatgggacggggggcacgaacgtgagtgtggcattgatgaaaatgtggtttgcgcttggtgcgatgggattaatgtttgttgcggtggcctctatttatgtcagcaggtacaaagtgaaaaacaaactgataaaagcagcggtttcttcactcgcttatgcctgcatggtcatctcgggattgatcgtgttaatggtcgttttcagcgggcctgtcaatgaataaagcaaaaagggggcgcggaatgcataagttaaaaatggccgtcataacggcaatggcggtgcttctgctgtccggctgtctgtaccctgaagcggaaaaaactgaaaataaagtatcttacaaacatcagcttcagcaggtgcaagcggcagtggatgaatttaaaaaggcgaacggcggacttctgccgattcagacaaaagatatgaaaacaccgctctatcaaaaatatccgatagattttaagcggctcgcgcccagatacatagaggagccgccggcctcagcttatgaaagcggaggaatgtaccaatacgtgcttgtcgatgtggaaaataggccgaccgtcaagctggtcgatctccaaatggcggaagcaatccgcgacatgaagctgcgtgtcaaaatgtatcaggaaaagcatacatatcctccctatgaggacgccgtttcaaaagggctgttcactttaaataaaaaaaagctcggcatgaaagactctccttcagtcaaaagtccggtttcaggcacgtctctgccgcttttaatcggcgctgacggagaaatctatgccgactatcgcgtcgatctcgcccgctgcctgaaggaaaacaaaaagaaaatcaaaccgggcgcggaaattcaggatattttatggaaagagactcctttcgtcccggccttttcagtcacatacaccgtaaatgaaaaacaggaacccgtttttttagaaagtcaaacgaaacaggaatgaacctttttcccgcgcatacaaatagggagaaaggttttcttgattttgatagaaaagactgcctgaaaattttctaaagatgtcatattgaaataggacaacgtcatacacatatagtgtcctgtatttgattggagaatggtgaatgaaaaatgataaggataggaagtccgggaggggatcacttggaaaaggtcgatattttcaaggatatcgctgaacgaacagggggcgatatatacttaggagtcgttggcgctgtccgtacagggaaatctacattcattaaaaaatttatggagctcgtggtgctcccgaatatcagcaatgaggccgatcgagcgcgggcgcaggatgagcttccgcaaagcgcagcaggaaaaacgataatgaccacagaaccaaaatttgtcccgaatcaagccatgtccgttcatgtcgcggaaggacttgatgtcaacatccgtcttgtggattgtgtgggatatacggttcccggggcgaagggatatgaggatgaaaacggcccgagaatgatcaatacaccttggtacgaagaaccgattccctttcatgaggcagcggaaatcggtacgagaaaagtcatccaggaacactccacaatcggggtcgtcattacgacagacggctcaatcggcgatattgcgcggggcgattacgtggaagcggaagaaagagtcatcgacgagctgaaggaagtcggcaaaccgtttattatggtcatcaactcggtaaaaccgtaccacccggaaacagaagcgctcagagctgaattaagcgcgaaatatgatattcccgtcctcgccatgagtgttgaaagcatgcgggaaacagatgtgttaagcgtcctcagagaagcgctttacgagttccctgtgctggaagtcaatgtcaaccttccgagctgggtcatggtgctgaaagaaaatcactggctcagagagagctaccaggaatcagtgaaagaaaccgtaaaagatattaaacgcctgcgcgatgtcgaccgggttgtcggccacttcagtgaatttgagtttattgaaagcgccggattggccggaatcgaacttggccagggtgtcgcagaaattgatttgtatgcgccggatcatttatatgaccagattttaaaagaagtggtcggcgttgaaatccgcgggaaagaccacctgcttgaattaatgcaggacttcgcccacgcgaaaaaagaatatgatcaggtatcagatgcgctgaaaatggtgaaacagaccggctacggcattgccgccccggccttagccgatatgagccttgatgaaccggaaatcatcagacagggatcaagattcggagtaaggctcaaagcggtcgctccgtccattcatatgatcaaagtggatgtggaaagtgaattcgcgccgatcatcgggacggaaaaacaaagtgaagaacttgtccgttacttaatgcaggactttgaagatgatccgctttctatctggaactccgatattttcggcagatcattgagctctatcgtaagagaaggaatctccgcaaaactgtcactcatgccggaaaatgcgagatataaactgaaagaaacgctggagagaattattaacgaaggctcaggcggcctgatcgccattattttgtaagctgaaggacctcttcctgaaacggggggtctttttttattctttttagatactggaaatcaatcaaggattaggaggaaaaaagcaaaaaaaggaatatttgttcggtgaaacacgtgaaaaccttgacgagcaagggattgaggctttaaaatgcttgatatggctttttatatgtgttactctacatacagaaaatcttcactttgttggacaaacattcctcaaagtgtctgttttcttttgaaaagccgtttacttgtctgttcttccctgctttgattttttatcagacaggtttagaatcaggctgaactgtgaagaaatgataataaactgctgatttgatacccttttgggaggaggtgaaaggcatgaacaagacagaactaatcaatgcggttgctgaagcaagcgaattgtctaaaaaagacgctacaaaagcagttgattctgtttttgatacgattttagatgcacttaaaaacggtgataaaatccaactgatcggtttcggtaactttgaggtgcgcgagcgttctgcacgtaaaggacgtaacccgcaaacaggtgaagaaatcgaaatccctgcaagcaaggtacctgctttcaaaccaggtaaagctcttaaagacgctgttgcaggaaaataattgtgaatatagatcgtgtatgcatctgatacatacactttgtttcttcacagaaaagccccttgataaaggggcttttcatatttaagcagcctcggtcaccgggcaggactttcgttttgcttttggcgcggcaaatgtgctagaatcgaaattaaatgtattcaatggtggaggacacagacaatgaaagaagttaataaagaacagattgaacaggcggttcgccagattttagaggcgattggagaagacccggaccgggaagggcttttagatacgccgaaacgcgtggcaaaaatgtacgcggaagtattctcgggattaaatgaagacccgaaagaacactttaaaaccgttttcggagaagaccatgaggagcttgttcttgtaaaagatatcgcgtttcattccatgtgtgaacatcaccttgttcctttttacggaaaagcgcatattgcctacattccgcgcggcggcaaagtgacaggcctgagtaaattggcgcgggcggtggaagccgtctcaaaacgcccgcagctgcaggagcgcatcacttcaacgattgcagaaagcatcgtagagaccttagatccccacggcgtcatggttgtcgtcgaagctgagcatatgtgcatgacgatgaggggcgtaagaaagccgggtgcaaaaacagtgacttccgctgtaagaggtatttttaaagatgacgcagcggcgcgttccgaagtgttagaacatattaaacgtgcggattaataatgatagagggtgcagatatgaattcaaagcattcaagtgattttgtcgtcattaaagcggtcgaggacggcgtgaacgtcatcggtttaacgagaggaacggatacgaaatttcaccattccgaaaaactggacaaaggcgaagtgattatcgctcagtttactgagcatacctctgccatcaaagtgagaggcaacgccctcatccagaccgcttacggagaaatgaagagcgaaaaaaaataagccggctgtttcccgcttttgccaaatgcccgcaaacggcgggagaatacagccaatttcttttttttatgctataatgatacctgcgtataataatgacgagtaaatctcatacatattagaataaatgtgaatttggggacaagggtgatatttttgcaagacatctacggaactttagcgaatctaaatacgaaattaaaacaaaagctgtctcatccttatttagcgaaacatatttctgcgcctaaaatcgatgaggataagcttcttctttttcacgctttgtttgaagaggcggacattaagaacaacgacagagaaaattacatagtaactgcgatgcttgtccaaagcgcccttgatacccacgatgaagtgacaacagccagagcgttaaagcgagacgaaaataaaaaccggcagctcaccgtgcttgccggcgactatttcagcggactgtattattcgcttttatctgaaatgaaggatatctatatgattcggacgctcgctacggcaattaaagaaatcaatgagcataaaatccgtctgtacgatcggtctgtcaatgacttgaatcaattgatcgaaagcatggcgattgtggaagcggccctgtttcacagagtgtcagaccactttaatcttccgcgctggaaagagctggcgagtgatttttttgtatataagcggctgatgaacggcaatgctatatttctcgatgtcatcggcaatattgtaaagtcaggaaaatcaaaggctgacataatggaagatagcttccgaaaggcaaagcaaagcattgaaacgctgctgccgctcaattcaccaatccaaaacctaatgctgaaccggcttaaagcgatcagccaggacaaaacatatcatcagaaagtggaagaagggtaatcaacatgcaggagtcaaaagaacagcgcgtacacggcgtgtttgaaaaaatctataaaaattatgaccaaatgaactctgttatcagttttcagcagcataaaaaatggcgcgataaaacgatgcagatcatgaatgtaaaagaaggcgcaaaagcgcttgatgtctgctgcggaactgctgactggacgattgccctcgcagaagcggccggaaaaagcggcgaaatcaaaggactggatttcagcaaaaatatgctgagcatcggtgagaaaaaagtgaaagagggcggttacagccaaattgagcttttgcacggaaatgcgatggagcttcctttcgctgatgattcttttgattttgtcaccatcggcttcgggctgcggaacgttcccgactatctgaccgtgctgaaagaaatgcggcgggtcgtcaaaccgggcggacaggtcgtatgtctggaaacatcccagccggaaatgttcggattcagacaggcatattttctttattttaaatacatcatgcctttcttcggaaaaatgtttgcgaagagctataaagaatattcttggcttcaagaatcggcaagagaatttcccggtatgaaagaacttgcccgtctgtttgaagaagcgggcctgacgaatgtcaaataccattcgtttaccggcggagtggctgctacgcatatcggttggaaatgatgaatatacagatgtttgggtgaatgatatgaaatttaaaatggcctattcttttttaaatgacgatattgatgtgatcgaaagggagcttgagcaaacggtgcggtcagactatcccttgctgagtgaagccgggctccacctgctccaggcgggcggcaagcggatccgccctgttttcgtattgctttccggcatgttcggcgactatgacattaataaaataaaatatgttgcggtgacgctggaaatgattcatatggcgtccctcgtgcatgacgacgtcattgatgacgccgagctgcggaggggaaaaccgaccatcaaagccaagtgggacaaccgcatcgccatgtataccggtgattatatgcttgcgggctcacttgagatgatgacgagattggatgagccgaaagcccaccggatcctgtccaaaaccatcgtagaagtatgcctcggagaaattgaacagatcagagataaatacaatatggagcaaaacctcagaacctatttgcgccgcattaaacggaaaacggctcttctcattgccgtcagctgccagctcggcgccatcgcttcgggagctgatgagaagattcacaaagcattatattggttcggttattacgtgggcatgtcctatcagattattgacgacattcttgatttcacctcaacggaagaggaactgggaaaaccggtcggaggggatctgctgcaaggaaatgtcactctgcccgttttgtacgcgctccgtcagcctgaattgaaaaatcagctgaaattaattaacagtgaaacaacacaggagcagctcgcccccattattgaaaatattaaacgcacagacgcgattgaaaaatcaatggccgtcagtgacaggtacttaaaaaaagcgtttgaaaaactgaatacactgccgagaggacgtgcgcgctcatcattggccgccatcgccaaatatatcggcaaacggaaattttaaattcctttttacgaacaagatgtgaacattctccgccctggattgattaattgtcagaaagatgttacgatttcggtgtgcaacttgaaagcctatacataatgatggggtggagaatcttatggaaaaaacttttatcatggtaaaaccggacggcgtacagcgccagctgatcggagagattttatccagatttgagcgtaagggcttacaattggcaggagccaagctaatgcaagtttcagaacagatggctgaaacccattatgctgaacataaagggaagccgtttttcggcgagcttgtggaattcattacatcaggacccgtatttgcaatggtatgggaaggggaaaatgtagtagagatcacaagacagctgatcggaaaaacgaacccgaaagatgcactgccgggcacaatccgcggtgactacggcatgtttgtcggcaaaaatatcattcacggttcagactccttagaaagcgctgagcgggaaattcacattttctttaaacaggaagagcttgtaccgtatcaaaaattaatggccgactgggtgtactaagccgtcagcctttctttttctcgcattatgaaaaggtttacatcatttatgaaagacagaggctgcgctgccctgtcttttcgtttctcacaaatcagcccgcgggctgatttttttattgaaatcgtacaatttcgacagaaaacaggctatactaggacaaaagacagcgagattgggagagaagcaatggagccttacgacatttttatcaccaagtggaaacaaataaccggcgttgatttatctttatacaaagaagcacagatgaaaaggcggctgacgtccctttatgaaaagaaggggttcagagattttcaggaatttgccgccgctttggaaaaggacaagcttttattaaacgaaacattggacagaatgacgatcaatgtttctgaattttaccgaaattataaacggtgggaagttcttgaaacctcaattctcccattaataaagcataacaaaccgttaaaaatatggagtgcggcctgttcaacgggagaggagccctatactttggcgatgattctcaatcagcagacgggactggccggatttgatatattggcgacagatattgatgaaaaggcgctaagcaaagccaagcggggcatctatcaggaacgctcgctgcaagaggtgccggcttccgtgaaaagccgttatttcactaagcaggctgacaacagttatcaagtaaaacaagagattcagaaaaacatccggtttaagcggcacaacctgcttgccgacagctatgaacaggattttgatctgatcgtctgccgcaacgtctttatttattttactgaaaaagcaaaagaagagctgtatgtgaaaatggcgggcagtctgaaaaagaacggaattctgtttgtcggcagtacagaacaaattttcagcccggaaaaattcggccttgagagcactgatacatttttttatcaaaaaagatagaagacatttaatgaaaacttgtggtatagttttacttaaaagcgttaatgcgatgaagggagaagaaagaaatgagatacttaacagccggagaatcacacggtccgcagctgacgacaattatagaaggtgtgcctgcggggctttatataactgaagaagacattaattttgagcttgccagacgtcaaaaagggcacggccgcggacgccgcatgcagattgaaacggacagagcgaagatcacaagcggcgtgcggcatgcccggacactcggttcaccgatcgcgctcgttgtagaaaataaagactggacccactggacaaaaattatgggcgccgcaccgattacagaagaagaagaaagtgaaatgaaacgccagatttcaagaccgagaccgggacacgcagatttgaacggtgctattaagtataatcaccgtgatatgagaaatgtgttagaacgatcttccgcgcgtgagacaacggttcgcgtggctgccggagccgtcgctaaaaagattttagctgagcttggcattaaagtcgccggacatgtcctgcaaatcggcagtgtaaaagcagagaaaaccgattacacatccattgaggatctcaaacgggtaacggaagaatcaccggtcagatgctacgatgaagaagcaggccgtcaaatgatggcagccattgatgaagcgaaggcaaacggcgactcgatcggcggaatcgttgaagtgatcgtcgaaggtatgccggtcggtgtcggaagctatgtccactatgaccgtaagctggacagcaagctcgctgctgccgttctgtcgattaacgcgtttaaaggcgtagagttcggcatcggttttgaagcggccggcaaaaacggcagtgaagttcatgatgaaatcgtatgggatgaagagaaaggctatacacgcgccacaaacaggctcggaggattagaaggcggtatgacgacgggaatgccgattgtcgtccgcggcgttatgaaaccgatccctactttgtacaagccgctgaaaagcgtcgacattgaaacgaaagaaccgtttacagcgagcattgaacgttcagacagctgcgcggttccggcagcaagtgtagtggctgaagcagcagtggcctgggaaatcgcaaatgccgtcgtagaacaattcgggcttgaccagatcgaccgaattaaagaaaatgttgaaaacatgaaaaaattatcgagggaattctgatgaaagagcttgaggttcggacagcttcctccgcatatcccgtgtatatcggtgaaggtataaggaaacaggccgctgcccttttgtcttcactgaacaggccgctgacaaagatccttctcatcatcgatgctgaagttgaccggctttacggtgatgagatgttccggcttttaaacgaaacatggcccgtgaaaaaagtgatcgttccaagcggagaagaagcgaaatctctaaaagagtatgaacggattcaaacgaaagcgatcgctttccatatggaccgctcctcatgtatgatcgccttcggaggcggcgtgacgggtgatttggccggcttttgcgcagcaacttttatgcgcggaattgatttcattcaaatgccgacaacactgcttgcccatgacagcgcggtcggcggcaaggtggccgtcaaccataaactcggaaagaacttaatcggtgcgttttatcagccgaaagcggtgatttacgatacggagcttctgaaaaccctgccggaacaagagctgagatcgggcatggctgaagtcatcaaacacgcgtttatcgccgattatgcttttttagaaaaacttctcacgtttgacacgttgcaaggactgacaagcgctgagctgaatgaaatgatttataaaggaatttcaatcaaatcggccgtcgtgcgtgaggacgaaaaggaagaggggataagagcttttctgaatttcggccatacgctcggccatgccgttgaggcggaatacggctacggacggattacacatggagatgcggtcgccctcggcatgcagtttgccctttacgtgagtgaacaggttgcgggttgcaagatgaacaggaaagaactcacacaatggctgattgggctcggctacccgggaagcatcagacaagatattgaaacgccggttctctccgcccggatgatgaatgataaaaaaacgcgcggaggcatgacacagttcatcgtgttaaaggaattaggcgaagcgcgggactgcatgctttcaaaagatgagctcgaaaatttgctgaacaaatggcgaatggaggaaacagcatgatgatacgcggcattcgcggagcaacaacggtggaacaagacaccgaacaagaaattttagaaaaaacacagcagctgcttgaaaaaatcattgaacaaaatggatgcaagccggaagacgttgtacagatcctattatccgccacgcctgatatccattccgtatttccggcaaaagcggtccgccgcctttccgggtggcagtacgtcccggtgacgtgcatgcaggaaatggatgtcaccggcgctctgcaaaagtgtatccgtgtcctgatgacggttcagacggatacgcctcaggatgaaatcaagcatgtctatttagaaaaagccgttgtgttaaggccggatttatcattgacaaaaaatactgacatgtaatacgataaacaaagcttagaaatacacaagagtgtgtatagagctggtaagtaagacattgaacagttgagtttagaatagggtagcagagaatgagtttagctgagctgagataaacacgtttttattctgcccaaaagaagcctttcttttgggtttatttcttatacgcaagactcctctcactcttcatctcattctccttaccgtaaggaggagaatcatgaatttacaatcggatgtttctttatttttaaaggacagtctgacacaccgcaccattccaatcgcagagacttttacggtcgacacgatcacacccattcagatggttgaaaaactggacagaaacattacgtatcttttagaaagcaaggatgagtcgtcaagctggtcgagatactcttttatcggccttgatccttttatcacgattaaagagagtcataacacattcactgccgctgatccaaatgggcatacgctgtttgaagccggagaattaaaagccgtgcttgactggatgaatgagagcttccgcattaaaacacccgagcttgatatcccattttcgggaggggcggtcggttatctgagctatgacatgattcctttgattgagccttccgtgccaagccacgcgaaagtaacagatttcgaaaaatgtatgctgtttgtctgccggaaaatcatcgcgtacgaccacgaaacgaaacaagtgcatttcattcaatatgcggcgcttaacggccgggagacggaggaagaaaagcgggccgtttttaaagaaaattgcgcggagcttcgtaagcttatcggtattttgacagaatcgaaagatatgaaagagccgtttttttctaaagaaacgtttgacacgccaagttttgccgctgtgacatccaattatacgaaagaagagtttatggccggcgtcaataaactgaaagaatatataaaagcgggagacatttttcaaggggtgctttcgcaaaagtttgacattccggtatccaaacattcatttgagctgtacagggtgctccgcatcgtcaatccttcaccttatatgtactatatcaaactgcctgacagagacattgtcgggagttcgcctgaacgtctgatccgcgtgcatgacaggcacctggaaattcatccgattgccggaacgagaagaaggggcgccggaaaagaagaggatgaacgcctgaaaaaagagctgatgaatgacgaaaaagaaaaagctgaacattacatgctcgtcgatcttgcgcgcaatgacatcggcagagttgcggagtacggttccgtagccgttccggaattcacaaaggtcgtttctttttcacatgtgatgcacatcatctctgttgtaaccggccgtttaaaacagggcgtccatcccgttgacgcgctgatgtccgcattcccggcaggaacactcacgggcgctccgaaaatccgcgcgatgcagcttttaaatgaattagaaccgacttccagagaaacctacggcggatgtatcgcttatatcggatttgacgggtcgattgattcgtgtattaccatccgcaccatgagtgtcaaaaacggtacggcgtcggtgcaggcgggcgcgggaatagtcgccgattccgtcccggaagccgaatatgaagaaagctgtaacaaagcgggggcgcttttaaaaacgattcaaatcgcagaagacatcttttctggcggggaggagaagacggatgaacaaatttctgcaatcgtgcgttaatggccgtacgctgaaaactggagaagccgaaaagctgatggagatgatgatgaacggggacatgtcgcagtctgagatcggcgggattttatcggtattagcccaccgaggtgaaacggcggaggagcttgccggatttgtaaaagtgatgcgggcgcgggcacagacatcaggtggcttggcggatgtcgttgatacgtgcggaacaggcggagacgggatttctacgtttaacatatccacggcagcggcgattacagcttctgctgccggagctaaagttgccaagcacggaaatcgctccgtttcgtctaaaagcggcagcgcggatgtgctggaaaaactgggggttcccattcaagccactccagaaagcgttaaacgcagcattgaaatgaaacaaatggggtttttgtttgcgccgctgtttcattcgtcaatgaagcacgtcgccgccgcaagaaaagagcttggcttccgaaccgtatttaatctgctgggcccgctcagcaacccgctgcaggtgaagcggcaggtgatcggcgtctattcatttgataaagcgcgcttgatggcaagcgctctggaacaatttgatgtcagacacgtcatgcttgtgtcggcccgtgacggattagatgaattgtccctctcagcaccgaccgatatcattgaactgaaaaacggtgaacgtctggaatattccgtttcacctgaacaattcggttttacagaaggttcactaaaggatattcaagtgagttcatcggaagaaagcgcgctcctcattcagaatatttttgcaaataaagctccgtcatccgctctgcatattaccgccttaaatgcgggcgcggccatttatacggcaggtcttgcaaacgatctgaaagaaggaacgaaaaccgccttagaagcgattcaaaacggagatgccaaaaggcagctcgaacgtctgaaacagaaagaggaagaaatgtatgcttgatcaaatcattcagcagaaaaaagaagaaatcaaatccatcgtgctgccggaaacctgtcaaattgaacggagatcctttaaaaaagcgctcctggacccgaaccgttttatcgggctgattgccgaagtgaaaaaagcttcgccgtctaaaggattgattaaagagcattttgttccggaaacgattgcggcggattatgaagcggctaaagccgacgccctttcagttctcacggatacccgtttttttcaggggagaaatcaatttctgacagatgttaaacaaaccgtgtctcttcccgtgctgagaaaagattttattattgattcccttcaggtggaggaatcgttcaggatcggcgccgatgccattttgctgatcggggaagcgctggaaccttcagagcttcatgagctttatctggaagccagcgagaagggcatggacgttctcgttgaagtccatgatgaaactgtgcttgaacggattttacaagtgtttcagccggacattctcggcataaacaaccgggacttaaaaacgttccgtacttctgtttcgcaaacggaaaaaatagcgcagcttgtgccggacggctgcctgctggtcagcgaaagcggcatcggttctttggctgacctgcaattcgtcaacaagcacggggcgcaggctgtattggtcggagaatccttaatgagagaggattcgcagcaaaaggcgatccgcggactgttcggggagtgatgatatgaaaaagcctgaggtaaagtactgcgggatacgatcgaagcgtgattacgaacttgcggcagcttcaggagcggattatctgggatttatttttgccgcaagcaaacggagagtaacgccggatgaggtccggaaatggaaagagcaggtccggacagacaagaaacatgccggagtatttgtaaatgaaacgatagaaaacatcgcgcaaatcgcctctgatctggcacttgacgccatccagcttcacggtgatgaatcgcctgaggatgccctccgtctccgtccgcttgtgcgctcggagatatggaaagcgctccatcacggggaagggacgcttcgtcagatggctcaatttgcacctgctgtcgacggatatgtcattgattcttcagtaaaaggaatgagaggcggcacgggaatcgcgttttcatgggctcgtgtccccttgtaccgaaagcaggctcaaaatgcaaacaagcgctgttttatcgcgggcggcgttaatcctgaaacgattaccggcttactgagatcgcgtccgtgcggtatagatcttgccagcggaattgaaaaaaacggacaaaaggatcaaacactgatccggcttttagaagaaaggatgaaccactatgtatccatatccaaatgaaatcggaagatacggcgaattcggcggcaaatttgtccctgaaacattgatgcggccccttgaggaaatcgaaacggctttcaaagaattaaagaatgatcccgtttttcatgccgaatataaaaaactattgtttgattactccggaagaccgaccgcattaacgttcgcagacagggtgtcagagtatttgggaggggcgaaaatctatctgaaaagagaagatttaaaccataccggctctcataaaattaacaacgcgttaggccagattctgcttgccaaaaagatgggcaaaacgaaaatcatcgccgaaaccggtgcgggacagcacggtgtggctgccgcgacagccgccgcaaaattcggttttacgtgtacagtttttatgggtgaagaagacgttgcacgccagtcgctgaacgtattccggatgaaactgctcggcgcggaagtggtgccggtcacaagcggcaacggcacgctgaaagatgcgacgaatgaggcgatcaggtactgggtccagcattgtgaagatcatttctaccttatcggttctgtagtggggccgcacccgtatccgtatatcgttcgcgaatttcagaaaatcatcggcgaggaagcgaaagaacagctccgccgggttgaaggaacgctcccggacaaggttgttgcatgtgtcggcggcggaagcaatgcgatgggcatatttcaggcctttttagacgaagatattgagctgatcggcgccgaggcggcgggaaaaggaattgatacgccgctgcatgcggcaacgatcgcaaaagggacgctcggggtgattcacggttcaatgacctatttaatacaagatgaatacgggcagattatcgaaccgtattccatttcagccggccttgattacccggggatcggccctgagcacgcctatctgcataaaagcggccgtgtaacgtacgaaagcgtgacagacgatgaagcgattgccgcgttgcgtctgctttctgaaacagaaggtattcttccggctattgaatctgcccacgccctggcaaaagcgtttgaaatggcaaaagacatggataaagacaaaatcattctcgtcagtttatcgggaagaggagataaagacgttcatacgctgatgaatgttttggaaaacggggtggagacacatgtttaatctgcgagattctgaaaaattatttatcccttttattacggctggcgatccgcttcctgacatttctgttgagctggcaatatcattgcagaatgcaggcgcttctgcccttgaaatcggcgttccttacacagatccgcttgcggacggacccgtcatacaacgggcttcaaaacgggctctggaaaacggaatgaatatcgtaaaagcaattgaacttggcggcaaaatgaaaaaaaacggcgttcatattccaattatcctctttacgtattataatcctgtgttacaattagaaaaagaatactttttcgctttactgcgggaaaacgacatagacggtctgcttgtacccgaccttccattagaggaaagcgcccttttacaaatgacatgcaaaaaggagaacatcgcttatatctctctggttgcgccgacaagtgaagaccggttgaaaataattactgaacaggcctgcggctttgtgtattgtgtatcctctttaggagtgacgggcgtacgcagcgaattcgacccgtctgtatactctttcatacgtaaggtgaaagaattcagctctgttccggtggctgtcggttttggcatttcaaaccgcaaacaggttgacgggatgaatgaaatatctgacggtgtcgttgtcggcagcgcgcttgtcaaaaaagttgaagagcttaaaacaaagcttgtgaatcccggaacaagagctgatgcgcttcttgaatttgaagaatacgcaaagacgttcggacgactgtacagtgtaaaatgaggtgactggatttgcagattaaagaacagctgcggcagctgaaaccgtatcagccgggcaaaccaatagaagaagtgaaaatggaatacgggcttgagaaagtagtaaaactcgcttctaacgaaaatccgttcggctgttcacaggccgctaaagatgcgctgcatcaggagattgagcagcttgcgctgtatcccgacggttacagtgccgctttgagaacacggctcagtgagcatctgcaggtcagtgaatcttcgatcatttttggcaacggctctgatgagcttgtgcagattatctgccgttctttattaaatgatcaggcaaacacgattaccgccgccccgactttcccgcaatacagacacaatgcggtgattgaaggcgctgaggtgcgcgaggttccgctccgcagtgacggcgctcatgatttggaccggatgctggaagcaattgacggcgagacgaaaatcatatgggtatgcaaccccaataatccgacggggacatatacttctgagcaagagctaattgcctttttaaacagagttcccgagcatatactcgttgtacttgatgaagcgtactacgagtatgttacggcggaagattacccagaaagcattccgcttttaaagcaatatccgaatgttatgatcctccgcaccttctctaaagcgtacggacttgccgcgctgcgcgtcggatacggcattgcggacgaagcactgatccgccagattgaaccggcgagagagccgttcaatacgagcagaatcggtcaggcttcggcactggcagcgcttgatgaccagacatttattcaggaatgcgtcgagaaaaataaagcaggccttaagcagtattatgattttgcagaaactcacggattaacttgttatccttcacaaaccaactttgtgctcattgattttaaccgcccggcggatgaactgttccaagccctgttggaaaaaggatatatcgtccgctcaggacaggcgctcggatttccgacagcgttaaggattacggtcggtacgaaagagcagaatgaggaaattctcacaattttagctgaaatattataagaggtgatcaggcatcacctctttgctctattaaaatagttgaaaaaggaaatgagtgaaatgaaggatactatattgcttgcggggatcgggctgatcggcggatcgatcgcattggccatcaaaaaggagcatccgcataaacggattatcggtgtggatatttcggaagaacagctcactgccgcgctgaagctcggaattattgacgagcgggccggctcatttacggaaggggcgcagcaagcgtctgttgtcattatcgccacgcctgtcgcccaaacgctgaaaatgctcgatgtgctggccgcatcagacatcacccatgaactcctgattacggatgtgggcagcacgaaacagaaagtcgtcagctacgccgacaaagtgcttccggctcactatcaatttgtcggcggccatccgatggcgggatctcataaatccggggccgctgccgcgaaagaatttttattcgaaaatgcgttttatattttaacacccggaaaatcaacttctaaagagtcagtaacgcatctgaaggaactcttgaaagcggcaaacgcccactttgtggagatgacccccgaggagcatgacggcgtaacgagcgtcatcagccatttccctcatatcgttgctgcaagcctcgtacatcaggctcatcatgctgaagaagattatccgtttttgaaacgtttcgcagccggcggttttcgggacatcaccaggatcgcctcaagcagcccggcgatgtggagggacatacttcttcataacaaagataaactgcttgaccgcttcaaagaatggaaacgggagattgacacgatcgaatcttatgtagaaaatgaagatgcggacagcctgttcggatattttaaaaaagcgaaagattatcgcgacggtctgccgctccgtcaaaaaggagcgatcccgtccttttatgacctttatgtcgatgttcccgatcatccgggggtcatttcggaaattacggcgatattggcagaagaaaaaatcagtatcaccaacatccgcattatcgaaacaagagaagatattaacggaattctcagaatcagtttccagactgatgatgaccggaagcgtgcggaaacctgcattcaatcccgcgccaaatatgacacattttacgctgactgaggtggaaaacattgaaaagagaaaaagtgacgtctttaaacggtgaaattcatattccgggggataaatccatctcccaccgttctgttatgttcggagcgcttgcggaaggaaccacaacggtaaaaaactttttgcccggagccgattgtctgagcaccattgcctgcttcagaaaaatgggtgtctccattgaacaaaacggaagtgatgtaacgatatacgggaagggcattgacgcactttgtgagcctgacagccttcttgatgtcggaaattccggcacgactatccgcctgatgctcggcattttagccggacgcccatttcacagtacggtagcgggcgacgaaagtattgcaaagcgcccgatgaagagggtgacggagcctttaaaacagatgggagccgcgattgacggaagagcggacggaggatttacgcctttatccgtaagaggcggacaattgaaaggcattgattacgtctcccctgttgcaagcgcgcagatcaaatccgccgtgctgcttgccggattgcaggctgaagggacgacgaccgtcactgagcctcataaatcaagagaccatacggaacggatgctgaacgcttttggcgccgagcttgcggaaacggagacgagcgcttccgtaacgggcggtcagaagcttcagggggctgatattttcgtgcccggcgatatttcttcagcggcctttttcctcgcggcaggcgctgtcgttcccggaagccggattgtgctgaaaaacgtcggcctgaacccgacacgcacgggaatgattgatgtcttaaagcaaatgggagcttcacttgaagtgattccttcagaagcggacagcgcagagccttacggagacctggttattgaaacctcagctctgaaagcggcagaaatcggcggagaaatcattccccgtttaattgacgagatcccgattatcgcccttttggcaacgcaggctgaaggcacaactgtcattaaagacgctgcggagctgaaggtgaaggaaacgaaccggatcgacaccgtcgtatcagagctccggaaaatcggcgcagacattgaaccgactgaagacggcatgaaaatacacggcaaaaaaacgcttgcgggcggagccgatgtgtcaagccacggtgaccaccgcatcggcatgatgctcggtgtcgcttcatgcctgacagaagagccgattgacatctgtgatactgaggcaatccatgtctcatatccgacattttttgagcatttagatcaattagccaaaaaagcctgaagacgattcttcgggcttttttcttcatgtgtcataaaactttgggctttgacatagcttgtcttaaacagaaaataacagaaagggggaatgcgttttcgttacagagacagccggaacaaattgcgctgtttgcgtataaagatgccgtccccttttttgccgttttcctcttaatcattttctgataaactataatgccgggtaaagcatcttatttgcgggcaggccctgtctgaattatgataagaataacccgaataaaaacccttttcattggttgatgaggtataggaaaagaaaggaccggtctgatttgaatacattgatccaagaagccataaaattagttgaagcaggtgaaaccgaaaagggactcaaagcgctttcaaaagctgaaacgcagcttcatgacgaagacaaagccattgcagcccagctctactatgaatggggaaacgccgaaaaagcgttagcgctgatcagtgatctgcatgacctttatccggatgagtctgagctgacgaatttttacgccgaattgttaatagatattgatgaagaagaaaaagctcttgaggtgctggagacaatttctccggaagacccgtcttacgcggaaagccttcttttaatggctgatctgtatcagatgcagggcttatttgaagtaagtgagcaaaagctgttacaggcgaaagcgatgttacaagatgaacctgttattgatttcgctctgggggaattatactttactcagggatcatacgcaaaagccgttccttactatgaagagacggcaaaagaacggcacgaaatcggcggcgtaaatgttcatcagaggctggctgagtcattgagcgcggcgggtgaatttgaggaagcgatttcatggtatgaaaaagcggcggcagaacatacagaaccgaatacgattttcgggtacgggttcacagcctatcaggcgggaatggtcaaaacagccatcaagcagctgtctgatttaaaagggcttgatccttcctattcatcgctttatatgccgcttgcaaaaagctacgaggcagaaggcatgtatgaagatgcattaaaaaccgctaaagaaggtattacttacgatgaatacaataaagagctttttctctatgcggcgaaaatggcgttaaagctcggcaacgcagaagaaggcaaaaagcttcttcaggaagcgctggcgctcgatccgggttacgtggaagcgctccatacgcttttagccgtctatcataaagaagaaagctttgaagagattattgatctgattcaggaagtccgcggctacggagaagaagatccgaaatacaattggtatttggcgggtgcttatacaggccttgagcaatacgctgaagcgaaaaaaagcttcgaagctgcgtatctccattatcaggatgatcgggatttcttatatgaatacgctcacttcttattggaagagggtctccagaaagaagcgctgccgcttttaaaacaagtgctttcaatggatggaacaaacgaagagcttgaagaaacaatcttacggatagaggatgaatttttaagataagcaggattttgaaccatgcttgctgaatgtataagtgatgtcagattatacgatcgatagaggagggaattacatgcagacccctgtttctgtcaatgaaaaaaaggattttatccgttggtttttaaatcattatcagcttaaacgccgggagtgcgtctggattttaaattatttaatgagtcatgattcattaatggaaaaagtccattttgtagaacaagctgaattttgcccgcgaggcattatcatgtctactcattgcgttgatgaggtgccgtttaggttttacaaagaaaatgtcatgactacggacgcggaaaaatcttttcacgacatccggttaaataaacagcaggatttatttatccagctgaatttccgttcggcctacagctcaccggaatatgccgctgttcttgaatcaaatccgcatctgccgaaagacctgtttgaaaataaacaggatcaggggatggccgaaaaaatattagaacacgccatttccactttccagcgggaaaagctgcttaaagatatcgacgaggcgctggatcgccacgacaaagaaacatttgaaaagctttcccgccaattgaatcagctcacataaatgacagccttgcagaatatgcaaggcttgttgcgtaaagaggaggaacgagacatgagatggagggccgctgatgccgatgcctatttacaatctgcggattacattgataccgctgtcattccgttaatttccataacatcttcaggaggcttaaaagaggccgttgaacagggggaaagcacccaattgctttctgaagagcttgagcgccaattgaagggacgggtatatttattcccctcttatacatatgttgatatagaccaatcacaaatcgctctgcttcaaaaactcaaagaagaggtgatgaccaactttcggcacgccttgttcctgacggcagacgaaaaatggaaggattctgaaatagggtctgatgtcatatacatacctgccgttccgtttgaacatatgaaagactctttaaagagaaaaatagcggatgacaagtgcggagaaattttgaacgttttgttacagaagtggaacaattcttaaaaacaccaggcatcccgcaaaacacccgttttgcctctgttgaccttgctgaaagattcatatattatgagggtgtcaaatctcagaattattttctattttagttaatttttggtcaatctttagggggggaagagatgggcggaaaacaagatatatcaagaagacaatttttaaactatgcgctcaccggcgtggggggatttatggccgccagtgcgcttatgcccatggtccgttttgcgctggacccggtattaaaaccgacgggagatcaaaaaatggtgcaggttgtcagtgtggatgagctgacgaaggagccgaagcggtttgactttaaaattcatcaagtcgacgcctggtacgaatcggaagaatccaggtcagcctgggtttacaagcatggggatgaaattatagcgctttctccgatctgtaaacatttgggctgcaccgtaaactggaacaatgatcctaaaaatccgaacaagttcttttgtccctgccattacgggctgtatgaaaaagacggcacgaacgttccgggcacgccgccgctcgcgcctcttgaccgttatgagcaaaaagtaaaggatggctttttgtatcttggaaaagcaaagcctaggggggaagggtgacatgctgaacaaaatttatgactgggtggatgaacgtctcgatattacgccgatgtggcgggatatcgccgaccatgaagtgccggaacatgtaaatcccgctcaccatttctcggcttttgtctattgtttcggcggtttgacgttttttgtaaccgttatccaagtgttgtccgggatgtttttaacgatgtattatgtgccggatataaaaaacgcgtgggaatctgtgtattatttgcagaatgaagtcgctttcgggcagattgtaaggggtatgcaccattggggtgcaagtttagtcattgtgatgatgtttttacatacgctgcgggttttctttcagggagcttataaaaagcctcgggaattgaactggatcgtcggtgttctgatcttttttgtgatgctcggtctcggttttacagggtatctgctcccatgggatatgaaggcgctgtttgcgacaaaggtaggtcttcagattgcggaggcgacgccattgatcggagcgcaggtgaaaactcttcttgccggccaccacgatattgtcggcgcccaaacgctgacgagattttttgcgattcacgtattttttctccctgccgctttgtttgcgctcatgggcgcccactttgtcatgatccgcaagcagggaatttcaggaccgctttaatacaaatctgatataaaagggaggggatgacatgcaccgggggaaaggaatgaagtttgtaggagattcaaggataccggctgaaaaaaaaccgaatataccgaaagactattcagagtatcctggaaagacagaggcgttttggccgaacttcctgctgaaagaatggatggtcggggccgttttcctcgtcggatttctcgttttaacgattgtgcacgagccgcctttggaacgggtggcggacccgacggatacagggtatattccgctgccggattggtattttctatttttataccagctattaaaatatgaatatgccgcagggagctacaccgttatcggcgcgatgattataccgggtcttgccttcgggtcgctgcttttggctccgtttctcgacagggggtctgaaagaaggccgtggaagcgtccggttgcggtcggcatgatgcttttggcgctttgcgctacggtctttttaacgtggcagtcagtcgcgacgcatgactgggcgaaggcggaggagcaagggaaaatcaaaaaagaagccgccattgatactgaatcagacggttataaggtatttaaagaacaaggctgtatttcctgtcacggggataatcttcaaggcggaagcgccggtccgtccctggtcgataacgggctgagcccggaagaaattaaaaaaatcgccgttaaagggaaagggcagatgccagccggtatttttaaagggaatgacaaacagcttgatcagctggcgaagttcatttctgaaacgacagcgaaataacgtattgtgaagtagacaatagcaggatatacttttatgaaaagagctgaccggatgtcagctttttttgcatgatacatactttttacggactgagagttgatggtatgaggtggatttcttatcttttagggttgcgcggcatgcttctgcttgttcttgccgttaattttatcggtacggtgtacggctattattggtatgtgcctcagcttgcggacacgccgttccgatttctgatatttgtgcctgacagcccgacggcgacgtttttcttcctgttcgtgcttctggcatttctcatgggaagaaacgcgccgctgtttgaagcgctggctcttgtaacccttgtaaaatacgggctgtgggcggtcggaatgaatgtctttgtgctggtcaaaatggggcagatgcctttggaagggtacatgctgattgcttcacattttgccatggccgttcaaggcgttttatacagcccgtattttcggttccggttatggcatcttgccgttgccgctgtttggacgcttcataatgatgtcattgattatcttttcggcatgatgccccgctactcaatgctcaatgactatatgcaagagatcggctatgctacattctggctgagcatattttcactcggccttgcatactatttggtgatttctaaaagacggataaagcttgacttacactgatagaatcttggtctaaccttgtcccgctcctcatattctgtaaagagaaggagtgggagggacctctatgaaacgaaagctgacgatctgtcttttacttgctcttatgtgtttcatcacaactgccaaagctgaagatgagggcggtctcaaggaactgaacgacctttcggataccgttttccaaatgacgcggcgttcgcagtatgatgaggctctgcaagtgcttggctactttaagaaaaaaatgacacacgtaaactcactgagcggcgccgaagtcaggcaggtgactctgggtttcaatgatttagtgcgcgttctgaaacaggcagacgcctcagataccgaaaaaatccgggcagccgcccagttcaggttggtaatggatgcgatggaagaccactccgatccgctgtggggttcgcttgaaagaccgattatggcgacattcagcgccttaaaagaagatgtcagcggaaacggaagtgaaaatttcaatgaaaagtggaatgaatttatatcattatatgatttaatttatcccagcctgacaatggatgtgtcggccggccagcttgatacggtggcgaaacatatcgaggtgattgagcaggacgggtttcagcagatgacaaaaggaacaaagcttgagcgtctgacgctcctgcaacaggatttaaagcgggtttttgacaaggtggagcgggatgacgctgacccttcgctgctctgggtcattctgacaacaggcggtatcattattactgcgctgacatatgtcggctaccgaaaatacagagcggaaaaaaagaaagagaaaaagcgtgagtatcctaagtctaaataaacacaaattgctgtaaaggagctaagttagtgaaaaaactcatccagcaattggcttcaaaacacctcccgcagccgatcagaggcagaaaaggggcgactgacgaaggaccgcgaaacctcgcgcgtgacttccagaatcctgacatgctcgttccgccttcaacggatgcaggaacggttcaaaacttgaaattctcattttctgatacgcatatgaggcttgaagacggcggatggtccagagaggtgacggtcagggaactgccggtatccaaaaacatcgcggcggtgaacatgagactgaagccgggagctgtgcgggagcttcattggcataaagaagccgaatggggatatgtgattaacggaggagtccgtttaactgcggtcgatcaaaatggaaggaattttattgacaacgtaagtgaaggggatctgtggtattttccttccggcattcctcattccattcaaggattagagcagggcagtgagtttttgctcgtctttgatgacggctctttttcagaaaacagcaccttttcagtaacggactggtttgcccataccccgcgcagcgtgctggaggcgaacttcggtgttcccggatatgacttggcctacattcacaagaaagagcgttacatgttccagctggaaccgcctcccccgattgaaaaggcagcagtttcttccccggaaggctccgttttggagccgttcagctacaagctttcccggcaggagccccttgttaccagcgggggaagagtaaagattgtcgattcaaaaacgtttaaggtgtcaaaaacgattgccgcagctctcgtggaagtcgaacccggaggcatgagagaattgcattggcatccgaatacggacgagtggcagtactatctttcaggagaagcgaaaatgacggtgtttgcggcggagggaagagcgcggacatttaactatcaagcaggtgacgtaggatatgttccttttgcaatgggacattatgttcagaataccggtgacaccgtgcttcgctttctggaaattttcaaaagcaaccgtttcgaagacgtctccttaaaccaatggctggcactgacgccgcagcgcttcgtcgaacagacgctcaatgtcagtccggcattcgcccgccgattgaaaaagaaaaaatcaccggttgtcaaatggaaacacaaacagtaaaggcggcaaaagccgcctttttattatcgtctgatcggatttttattttcatcaagcgtaaatccttcgccgagcacatcatgaacgtcgcttactgcaacaaaggcgtgcgggtcaacggaagtgatgacgcttttcaaaagcacaatttcgtttttcggaacgacgcagtaaagaacgtccctgtcttcttttgtataggatccctgtccttttaaaacggtgacgccgcgctccatctcttcaatgattttttgctggatcaaatcgtttttcgaagaaataatcgttgccccttttgcggcatagccgccttcctggataaaatcaatcaatctcgcagcgacaaaaacggctacaagcgtgtacatcgcttccttgtaagaaagatacgtaaacaaagaaagcagaatgacacaggcgtcaaaggcaaacatcgtccggcccatcgggattccgaaaaacttgttgatcagcctggcgatgatatcgaccccgcccgtcgtgccgccgtatttaaaaataatgccgagacccgcgccgataaatacaccggcgaacaaggcggccagcgctaaatcatgcgacagcggcatatgaatttcgtaacgctgaaaaacactcagaaaaacagaaagagagacggtgccgatcagggtatagacaaacatcgttcggccgagcatacgccagccgatgaaaaagataggaatgttcaataccaggttggaaatagaagggctgatgtggaataacgcatataaaagcagcgtaatgccggtaaatccgccttccgccaaattgttctgcatattaaagtgaaccagtccgaatgaaaaaacagcagcgccgattaaaataaagcaaatgtttttgattctgatttctccaagcattgcatcaaaccccttttccttccataagattgcgtaaatattatagtggatacaaaagaaaacagcaaactgccgtttttaacatttgtcaaatgtacttgaattagctaacatggaagagatgacaggaggtattcgcacagtgagtgacaaaacgatgaaagacttacaagctgaggtcgatgaatatatcggccaattcaaagaaggctatttcagcccgcttgccatgatggcccgtctcacggaagaactgggcgaacttgcaagagaagtcaaccattattatggggaaaagccgaagaaaacgacggaaaatgagaaaagcatggaagaggaaatgggcgatgtgctgttcgtcctgatctgcctcgccaactcccttgatatttcattggaggaagctcataaccgcgtcatgcataaatttaatacacgtgataaagaccgctggactagaaaagaagaaggaaagtaggagaaaccatgtcaaatgaaaccattaaagtcgtcattgccggaccaagaggcagaatgggccaggaggccgtaaaacttgccgtccgcacgcctcattttgagcttgtcggcgccattgaccatacatacgatcagcaaacattgcgggaagtgatgtcagctgattcagacgctcttatttatacggatatccgcgcatgtttccaagaaacaaaaccggatgtgctgatcgatttgacaacgcctgaaatcggcaaaaaacatacgaaagccgctcttgaacacggcgtccgccccgttgtgggaacgaccggattttctgaagcggatttagaggagcttcaagccttgactgaagaaaaaggaatcggcgccatcatcgctccgaactttgcattgggcgcggtgctgatgatgaagttctcacaaatggccgccaactattttgaagatgtagaaatcattgagcttcatcatgatcaaaagctggatgccccgagcggaacggcgctgaaaacagcggaaatgatctcaagcgtccgtacagaaaagcagcagggccatcctgatgaaaaagaaattctgccaggcgcccgcggtgctgaattaaacggcatccgccttcacagcgtgcgtctgccgggccttatcgcccaccaggaagtcatgttcggcatggacggccagacgctgaaactgcgccatgactcctataaccgggcttcctttatgtcaggagtgaagctgtcagtggagcaagtgatgaaaatcgaccagcttgtatacggactcgaaaatattatcgactgaatcggcaagggggagaacatcaaatgaaaatcgctttgattgctcacgataagaaaaagcaggatatggttcagtttacgaccgcatataaagatatactgagccatcatgagttatacgcgacaggtacgacaggcctgaaaatccaggaagcgaccggattgtccgttgaacgttttcaatccggcccgctcggcggagatcagcaaatcggcgcattgattgcggcaaatgccctggatctcgtcatttttctgcgcgatccgttaactgcgcagcctcatgaaccggatgtctcggcgctgatccggctgtgtgacgtatacgcgatcccgctcgccacaaatatggggacagcggaaatcctcgtccggacgctggacggcggggcatttgatttccgcaatcttgtgcgcggaggagagccgaatgtctgaacacgttgatattctggcgttcggcgcccatagtgatgatgtcgagatcggtatgggcggcacgatcgcaaaatttacggctcaaggaaaaaccgcggtgatatgcgatttgaccgaggccgaactatcatccaacggaacggtagggataagaaaagaagaagcggcagaggcggcacgaattctcggcgtaaaagagagaatccagcttacgtttcccgaccgcgggcttttgaaaagtgaggacggcatccgccggattgtcagtgtcatcagagcctgccggccgaaaaccgttttcatcccttatccgaaagaccgccatcctgaccacggcaatgcggcggctttggtcgaagaagcggtgttctcggcgggaattcataaatacagagatcaccaggaactgccggctcataaggctcagcgcgtatactattatatgatcaatgggtttcaccgtccggactttgtaatcgacataacggaaaccatcgatctgaaaaaagaaagcctgcacgcctatcaaagccagtttattcctacggcgcagtcagtgaacacaccgctgaccaacggttatattgaaatggtggaagcgcgggaaagactgtatggcaaagaagccgggacggggtatgccgagggtttcttttcaaaacagcttcccgttttgaatgatgatgtttttgggggcggacaatgagaccattaaaaatagggattacatgctacccgagtgtcggaggctcgggtattattgcgacggaactcggcaagctgcttgcagaaaaagggcaccaggttcatttcatcacatcaagcatcccgttcagattaaatacatatcatccgaatattcattttcatgaggtggaagtcaaccaatacgcggtatttaaatatccgccttatgaccttacgctggcgagcaaaatcgccgaggttgccgcgagggaaaatcttgatatcattcacgcgcattatgcgctgccgcatgcggtatgcgcttatcttgccaaacagatgctcaagcgcgacatcggcatcgtgacgacgcttcacggtacggacatcaccgttttaggatatgatccgtcattaaaagatttaatccgttttgccatcgaagcgtccgacagagtgacggcggtatcaaccgcgcttgccggagaaacatatgacttaatcaagccggataaaaaaattgaaaccatctacaactttattgatgaacgtgtttatcttaagaaaaatacagagagtataaaagagaaacatggcattttgccggatgaaaaagtcgtcatccatgtctcgaacttcagaaaggtaaaacgtgttaaagatgtcatccgcgttttccgtaatatcgcagccaaaacaaaggcgaagctcctgcttgtcggcgacgggccggaaaagtgcgtcgcttggcagcttgtcgaaaaatacggtttgcaggatcaagtgctgctcctcggaaaccaggacagggtggaagagctgtattccatcagtgaccttaagctccttctttctgaaaaagaaagtttcggactcgtacttctggaggcgatggcctgcggcgtgccgtgcatcggaacaaatatcggcggaataccggaagtgattaaagatcaagtaagcggttttctggtggaagtcggcgatattcaggcggcatctgaaaaagcgcttgccgttttagaagataaacagctcagcaaacgattgactgatcatgcgctgaaaatggtggagaccgccttttcttcgcaaagaatcgtcagtcagtatgaacggatttatgacgaattggcaggaccggagtgatcttatggaacaggaatttgtcaaagccctccccatccttcatcatctgatgaaggcgggccatcaggcgtactttgtcgggggagccgtcagagacagctatatgaaacgaaaaataggtgatgtggacatcgcaaccagcgcttcgccgaatgaggtggagcgtctctttaagcggactgtcgatgtaggaaaagagcacggcaccgtcatcgtcctgtgggaagatgaaacctatgaagtcaccacttttcgtgccgaatcagaatataaggactaccggcgccctgaagctgtgcggttcattacttctttatcagaagacttaaagcggagagacttaacgattaatgcgatggcgatgtctgccgaaggagagctgcttgattatttcggaggcgcacatgatatcggacaaaagctgatccgtacggtgggtaatcctgaagaccgttttcgggaagacgctctgcggatgatgagagcggtccgctttatgagtcagctcggctttctgttagaaaaagaaacaagagaggccgtcataaaagacagggagcttttggcacatgtatcagtagaacgaaagaccgtcgagtttgaaaagctgctgcagggcgcttcctcacaagaagcgattcaaacgatggtgcagataggtttgatacaagagctgccaggcctttccggttatgagcagcaaatgcttgaagcaagcggctttcctttttcttctttagatgcacgcgaagaacgctgggcagcgctgttattgtttctcggtctttgtccgaaaagcgccgaggcgtttttaaaacaatggaaactgccgggaaaagtcataaaaaaagcggtgcagatcataagcgtttatccggcgcagctggaagcggaagcgatgtaccgggcgggagaggcgctgttttcagccgttaaaatcgggatgctgaaaaagcataagacgattgatgaacaaaagctgaaaaaggttcagagcctgtatgagcagctgccgatcaaaagccttcgagacctcgacatttcaggcgctgatctgatggagctcagaaaccgccgcgcgggtaaatgggtggccgaagaacttcgccggatcgaagaagcggtattggcagggaagctccctaaccgaaaacatgatataaaggagtggctcgcatcatgggatcaacattaagaacccgattaattgatttattttctgaggcgggtgacggctttatctccgggcagaaaattagtgacgcgctcggctgctcgagaaccgccgtttggaaacatatagaggagctccgcaaagagggctatgaagttgaggcggtcagacgaaaagggtacaggctcattaaaaaaccggggaaactcagtgaatccgaaatccgtttcgggctgaaaacagaggttttgggcaaacagcttcattaccgggacgtcctgccgtccacccaaaaaaccgctcatgaacttgccaatgacggcgcgccggaagggacgcttgtagtcgccgataaacaaacggcaggcagaggaagaatggccagagtatggcattcacaggagggaaacgggatttggatgagcctcattctgagacccgacgttcctttgcaaaaaacgccgcagctcaccctgttatccgccgttgcggtcgtacaggccatcgaggcttttacaggtgtacagcccgccattaaatggccgaatgatttaatgattcacggcaaaaaagccgtcgggattttaactgagctgcaggcagaagaagaccgtgtccgttcggttattctcgggatcgggatcaacgtgaaccagcaggaaaccgattttcccggcgagcttcaggacattgcgacaagcctcagcatggaagccggcgaaaaaattgacagagcgggtctgatacaagagattctgctgacttttgaaaaacgctatcaggattacttgaaccacggctttacaccgatcaagctgctatgggaaagctatgcggtcggactggggaacgagctcagagcgagaacgctgcaagggacgttttacgggaaatcgctcggcattgatgatgagggagttcttctcttggaaacgagagacggtataaagaagatctattctgccgatattgagctcaattaatcttagttggtacaagcctcgtgaatttggtatacttcctatgggcagtatcataatgaactgcacctgatcagcagaacagagattacgaaaagtctgccttgatccaaaaaaggactgggacagagggatgacattcgccgaaggttaaacaagtggggatccttcttattttacagaaggcttttttgcttgcgaagaattggcggctcatctcctcaccgtttagaggaggagaaacagaatgaaaacaaaactggatttcgtgaaaatgaaggaaaacggagagccgatcgtgatgctgaccgcttacgattatccgcaggcaaagcttgcggaacaggcgggagtcgacatgattttagtcggggattcgctcggaatggtcgtgctcggactcgattcaacagtcggtgtaacggtcagtgacatgattcaccatacaaaagcggtaaaacgcggtgcgaaaaatacgtttatcgtaactgacatgccgtttatgtcttaccacctttcaaaagaggatacattgaaaaacgccgcggccattattcaggaaagcggcgcggacgcgttaaagctggaaggcggagacggcgttttcgaatccatccgcgcgctgactctcggcggaattcccgtcgttagccatttaggcctcacaccgcagtctgtcggcgtattaggcggatataaagtgcagggaaaagatgagcaaagcgcgaaaaagctcattgaagacagcatcaaatgcgagcaggcgggagcgatgatgctcgtgcttgaatgtgtgcctgctgaactgactgctaaaataaaagaagaagtatccattcccgtcatcggaatcggagccggttcaaaagcggacggccaagtccttgtctatcatgacgtcgtcggccacggcgtggacagaacaccgaagttcgtgaagcaatacgccaaaatcgacggcacgattgagtcggccctcagcgattatgtccgtgatgtgaaagaacgggttttcccggaagaaaagcattcctttcagataaaccaaactgtgctgcaaggcttgtacggaggaaagtaagcgatgaaacaactgacagaaactcaacagctgaaagaattgattgcacaataccgctcagaaggccggacgatcggattcgtcccgacaatgggttttcttcatgaaggacatctgacgctggttgaaaaagcaagcaaagaaaacgatattgtggtgatgagcatctttgtcaatccgactcaattcggaccgggcgaggattacgaagcatatccgcgagatttaaagcgcgatgcccggcttgcagaacaggcgggggcagatgttttgtttacgccgtctccaagtgacatgtacaaaggcgagcaaaatgttgccgtgcaagtgaaaaggagaactgacgtgttgtgcggcgcctcccgcgtcggccattttgacggagtggccactgtgctgacgaagtttttcaatctcgttaaaccgacccgcgcctacttcggcctgaaagatgcccagcaggcagcggttgtggacggattaattgaggacttctttatggatatcgaattggttgcagtggacacggtcagagaagaagacggacttgccaaaagctctcgcaacgtctatctgactgagcaggaacgcaaagaagcgccgatgatctataaagcattacagcaaggcgccgaactgatcagagacggtgaaagaaatccggaaaccgttataaaaaccgtcaccgatatcatcgaaaacacaagcggcgtcattgattatgccgaactgtacgcttatccggagctgactccgcttaaaacattaaacggcaaggtcattctggcctgcgccgtccaattttctaaagccagactgattgataatatcattattgatattgatgaatgggagagatcataatatgtaccgcactatgatggccggaaaactgcaccgcgctaccgtgacggaagccaatttaaactatgtcggcagcattacgattgatgaagatcttttagatgccgtcggaatgctcgctaatgaaaaagttcagattgtgaataataataacggagcgagacttgaaacgtatattattcccggtaagcgggggagcggcgtcatctgtttaaacggagcagctgcccgtctcgtccaagaaggagataaagtcattattatttcttatcaaatgatgtctgatcaggaagcaaaaagccatcagccgaaggtggccgttctggatgatcagaataaaatcgagcagatgctgggtcaggagccggcacacacgattttgtaaaagagcccccttcatgggggttttcttttaagatttaggggcaaaagctgtttttccgctccatttctcaacaaaacgtgttacacttttctcgtatgcaagaattgaggtgtccattttaatgaacaaacaacggttcgttgtcatagatgtcgaaacaacaggaaattcgccgaaaaagggcgataaaatcattcaaatcgcagcggttgtcattgaaaatggacaaataactgagcggttttcaaaatatatcaatccgaatcaggccatcccgccgtttattgaacagctgaccggaatttcgtccggaatggttgaaaatgaactgccgtttgaagcggtcgcagaggagatttttcatctgcttgacggcgcgtattttgttgcccacaatattcatttcgacctcggatttgtccggtatgaactgagcgaagcgggctatgagctgccggattgtgaagtgcttgatacggttgagctttcgcgtattgttttcccggggtttgaaggatataagctcggtgagttgtgtgcggagctgaatattgttcatgaccgccctcaccgcgcagacagcgatgcggaggttacgggactggtctttttagacattttacataaactgaaacatttgcctttaccgacattaaagcagcttagaaggctttcacagcattttatcagcgatttgacgctgcttttggattcttttatacatgaaagcaggccggcggaagaaaagcgctgcattccatacgcctctttttcaattaaagagcccgatcacattccggtttcccgtccggtgaatgcggccattgaccttgaaaagtggaacgaagaaaaagaacagatcttatccggcatcatcccccgctatgaaaagcggaaagggcagctttcgatgatggatgaagtgcttggcgccttccgcaatcgggagcatgcgctgattgaagcggcgcccggcatcggaaaaacgatcggttatctcgttccggctgttttatttgccaaagcggagcaaactcccgtgattatcagcacgtactctactcttttgcagcagcagatcatgtctaaagatcttccgcttttggagcgtatgtttccttggccggtcaaagccgctattttaaaagggaaatcacattatctgtgcctgcctaagtttgaacatattctgcatgaggaagatgacaactatgatgcggttttgacgaaagcgcagcttctcgtctggctgacggagactgaaacgggcgacgccgctgagctgaatcttccatcaggcggcagattgctgtgggagcgcatggcttacgatgagaattcttttttgaaaaaagggaaggactcggctgccgggttttatgaacgggctaaagaaaaggcgcaggccgcagatctgattatcacaaaccatgctttgctgttttcagatcaaagcagtgaaacgaaaaaactgcctgcaagcggaacggtcatcattgatgaagcgcatcatttcgaacgcgctgccagcgagcacctggggaagagagcttcatacatcggactgcacacaaagctcagccgaatcggaaccttaaaggaacacggactgttaaagcggatgagaaaactgttttatacgtatgaactgccggcggaaagtttttttgacgccgatgagtggatgaagcatattcaatcggaaagcgacgcatttttcagttcagtgcattcttttgtcaaacgaagaaaacctaaagacgatctgaaccgtctcgtttatagtctcaatcataaaagccaggataaagggtttcacatgataacggacggagccgagcggctttgtgcgatgctggatcagctgcttgacatgttttcagtacaggagaaactgttacatcaaaagcttgatcagatgaaaagcggagcggcttttttagcggccgaatatgtaaagtgtatcagggggctgaaagaatatcgcgatacgttcagcaggctgctgtttgaaaatgatgagaaagaagccgtttgggttgaaattgacgcgaagggcgcaaaaaatgccgtcagtatctatgcgcagcctttggagcccggtgaaatgctggcagaccagtttttcgcccgcaaaaaaagcgttgtgctcacatcagcgaccttaatggtggagcattcttttcaatttatgattgaaaggctcggacttgcggatttttatccgcgcaccaaaagcatcccgtctcctttttcatacgatgatcagatgaacgtcatcattccgaaagagatgaaatccgttaaatatgacggagagcgggaagtcattgagcatattgccaagtatgcagaaatcatgtcaaagggaaaacagccgaagatccttgtcctgtttacgtctcatgatatgctgaaaaaagtgtatcaggaactgaaactcagtatggagatatcaggcattcagcttctcgcccaaggtatttcgggcgggagtcccggtaaattaatgaaaacctttaaaacggcaagccgggcgattttgctcgggacaaatcatttctgggaaggcgttgattttccgggggatgaattgtcaaccgtcatgatcgcaagacttcctttcagggcgcctgacaatccgcttcatgccgcaaaatgcgaatttgccaaaaagcaggggaaaaatccgtttcagacgatttccctgcctgaggccgtgttaacgttcagacaggggatcgggcgcctgctccgtacggcgggagacaagggaacaatcgttcttttagatcagcgtgtaaagacggcgggatacggacggctgtttcttgaagcgctcccgacttcatctcttttggagctgacggatgccgaactcggggattatgtcagccaaacggaataaaagccgcataaacgcggctttcgtggtgtgggatgaggaattgtttttatagtaaaagcgggttcatgccgccttgtgattttattatgccgcgggcgcatcccgttatgactaacaaaatttgttcgaccgatggagggtataaaaatggaaagcaaaattgaaattctgtcaacgattaatgtggagcattcagatgatttatataaaatcgtcgatacattaaaccggactttgaaacgggacaatctgatgttcgggcttgcgctcgacgaagaaaatcaaaatgaagcggtcttcaccatttatcgcacataggtgaaaaagatgagaaaaaaagcattaatatttacagccgtatttggtattatttttttagcagttcttttattttcggccagcatttttaaatctgcaatggcccaaaaagaagaaggccacgaaacagctgccgcagccgctaaagaaaaaacggatctgacagatgctgagaaagtggagacctttgtcggcaaacagaaatattatgttgttaccggaacggataaacatggaaaagatatgtatgtatgggttccggccgacaaaaaagcaaaaattctctcaaaaaaagccagtgacggcatttcaagcggcaaggctgccaagatcgttcgggacgaagggcttgtttccaagctgaatggcgttcacccggcgagagaaaacaatgttccgttatgggaagtgacctatatcaacaaaagcgggcagtatagctttagttatgtggactttacaagcggcaagattctcaaaaacatcacaccgtgagacgtattagggggagttcaagttgaaattggcaaaaagagtatccgcattaacaccgtctgcaacacttgcaattactgcaaaagcgaaagagctgaaagcagaaggccatgatgtcatcggcctcggagcaggagaaccggattttaatacgcctcagcacattatagatgccgcggtgcgttccatgaatgaaggccatacgaaatatacgccttcaggcggtctgccggcgctgaaagacagtatcgcaaaaaaattcaaaaacgaccaggggattgaatataagccgtcagaaatcattgtctgcaccggagcgaaacacgctctgtatacattatttcaggttattctcgatgaaggggacgaagtgattataccgactccttactgggtcagctaccctgagcaggtgaaactggcaggggggcgtcccgtctatgcagaagggctggaatccaatcagtttaaaatttcaccggagcagctgaagcaggctatcaccgagaaaacaaaagcgctcattatcaattcaccgagcaacccgacaggtgttatgtatacgaaagaagagcttgcggaactcggaaaagtgtgtctggagcatggcattctgatcgtttccgacgagatttatgagaagcttacatacggaggaaaaaaacacgtctcaatcgcacagctttcagataaattgaaagagcagacgatcatcattaacggcgtgtcgaaatctcacagcatgacgggctggaggatcggctatgcggcgggttcggagacgattattaaagcgatgacgagccttgcgagccacagcacatcaaatccgacgtccatcgctcaatacggcgccattgcggcctataacgggccggctgagccgctggaagagatgagacaggcatttgagcacagactgaacaccatttacgctcagctcagtgaaattcccggattcacctgtgtcaagcctgaaggggcgttttacttgtttcctaacgccaaagcggccgcagaaaactgcggattcaaagatgtcgatgaatacgtcaaggcgcttctggaagaagaaaaagtcgccgtcgtgccgggctcaggcttcggctcaccggacaacgtccgtttatcttacgcaacgtcactcaatcttttagaagaagcggtcgaaagaatccgccgcttcacggaaaaacacagctgattctgaaaaagcggcttttaaagccgcttttcacttgcattgaccccgttagagtagaacgggtataataaagtgatgaaaaaagagattcaggcagattcctgaatgtctttcttgttctggagggaaagagtttgaaaacaacaatcaaccaagtgtataaacacacaggcgaggaagtaacgattggagcttgggtcgctaataaacgctcaagcggtaaaatcgcatttttacagctgagagacggtacaggcttcattcagggagttgtcgttaaagctgaagtagaagaagacatcttccaaatcgcgaaatcagtgacacaggaaacgtcactttatgtaaaaggaattgtgaaagaggacgagcgttcaccgctcggctatgagcttgctgttacatccattgaagtcattcacgaagcgactgattatccgattacgcctaaagagcacggtacggaattcttaatggatcacagacatttatggctccgttcgaaacgccagcacgcaattatgaaaatccgcaacgaaatcattcgtgcgacttatgaatttttcaacaaagaaggcttcgtgaaagttgatccgccgattttgacgggaagcgctcccgaaggcacgactgagctgttcgcgacgaaatattttgatgaagacgccttcttgtctcaaagcggccagctgtatatggaagcagctgcaatggcgctcggaaaagtattctctttcggaccgacgttcagagcggaaaaatcgaaaacgaaacgccatctcatcgaattctggatgattgagcctgaaatggcatttgttgaatttgaagaaaaccttgaagttcaggagaattatgttgcatacatcgtacaaagtgtgctggaacattgtaagatcgagctgaacacattaggtagagacacatcgaagcttgaacaaatcaaagcgccattcccgcgcattacgtacgataaagcgatcgaattcctgaaagaaaaaggctttgacgatattgagtggggagatgacttcggtgcgccgcatgaaacagcgatcgcagaaagctatgacaaaccggtgtttatcactcattatccgacgtcattaaaaccgttttatatgcagcctgccaaagatcgtgacgatgtcgtgttatgtgccgacttaatcgctccggaaggctacggggaaatcatcggcggttcagaacgcgttcatgatatggatttattggaagaaagattaaaagaacacggtctggattcagatgcttacaaatggtatgctgaactcagacaatacggttctgttccgcactccggcttcggcctcggacttgagcggacagtggcttggatcagcggagcgcctcacgtgcgtgaaacgattccgttcccgagacttctgaaccgtctgtatccgtaatagttatgaaaaacgaagtctcctgcaagggagactttttctaagtaaaggggaaaactcccggagataaccttttacagtaagaggtgtaaggatgaaaaaacagcaatttatagatatgcaggaacttggcatttcaagcattcccaacctgctgttgacacattaccggcagctcgggctgaatgaaaccgaattgatcctgcttttgaagattaaaatgcatttggaaaagggctcttattttccgacgccgtttgaacttcagtcaggcatgtccatctctgctgaagaatgtacaagctgcctgagaatgtttattcaaaaaggttttctgtttattgaagaatgtgaagaccataacggcataaagtttgaaaaatattctctgcagccgttatgggcgaagctgtatgattacatgcagcattctcaaaatgaaacgcaggaaagaacgtcagaaagagaacaaaaaagcctgtataccatctttgaagaagagttcggaagaccgctgtcgccgcttgaatgcgagacgctggccatatggcaggaccaggatcagcatgatgcgattctgattaaacacgccttaaaagaagccgttttatcggggaaactcagttttcgctatattgaccggattttatttgaatggaaaaagaacggcttcaaaacggttgagcaggcgaaggcgcacagccaaaaattccggcgtgttcaaacgaaacaaaacgatccgcaaaaagagtatacgaggcaggtgcctttttacaattggctggaacaataacatgagaaggggagaaacgtgttaaatttaaagcagattgaatattgtcttgaaaaaatcggcgatatgtttccgcacgcagaatgtgaacttgtccattcaaatcctttcgaattggttgtggcagtcgcattatccgcgcaatgtacggacgctctcgtcaacagagtgacaaaaacgctatttcaaaaatataaacggcccgaagattatcttgccgtatcgctggaagaactccagcaagatattaaatcaatcggtctgtaccgtaataaagccaaaaatattcaaaagctgagcaaaatgatcatcgaagagtacggcggagaagtgccgaaagaccgggatgagcttgtgaatctgccgggtgtcggacggaaaacggcaaatgtggtcgtgtctgttgctttcggcgtacctgcgattgcagtagacactcatgtggagcgggtctctaaacggctcggtatctgccgctggaaggactctgttttggaagtagagaaaacattaatgaaaaaagtgccgaaagaggattggtctgttacgcatcacagattaatatttttcggcaggtatcattgtaaagcgcaatctccccgctgtgcggaatgtcctttgcttccgctatgcagagaagggcagaagcgtgacaaaaaagggctggtgaaacggtgacggcgattgacattctggcaggctatgaaacatacctgcgcagccttacggacttggaaagccttgagatcaaaacggcgctgcgccgccatccgctgtatatggatttcagcggtcagccaaccgtgcagccatggagggaaaggggcgaatatgtcccgtttctgtttcaagtttggaatgaaacgaaagaaacgctgcttcccgtttttcaaacaagaaaatcgagatgtgatcaaaatgacatgctgaagggaattgcctgtctgattgccgcttttcactggacggcaggggagcgggtcacatcactcgattggtctgtgcttgaaacaaagcattttcccgccgaaccgatcaattgggcggagcgaatggcgtttattttaacaaaaccgactcaatttcactcctttattcagctggatgaattgatgacggagatgaagaaacaatatcataaatatgaagtcatgaacaaaagttaaaaacctccttttcttataaggaggtttttttgtatgaaaaaaatccttcacctgtttgaggtgaaggatttcgtccgccgctaatgagcggaatttgactggatggttgacgaattggactgcccgttgatatttgaagatgagtcttggtttttgtccgtttgaccgctgtcaggtttatttgagccgtctgaaccggaatcggaatcattatcagggccgttatcttgctgtccgttgttatcggtcccgttaccgggctgattctgattgttgttatctgtttgatccttatcggattgatcctgatttttatccgggtcatcagttggtgtttgatccgatccgtcagacgtatctgtttgattgtcatctgtgtttgaatcatcggtttgcgtcttgtccttatctttatcttcatcagatttctgttcatcgtcagtcgctttatctttatctgcatcgtcttcttcatctttcgggactttgaaagatgctgatgccgtatcgctttttccgtcatcgttttccgctgtcacctggaagctgtatgtggagcctggtgtgacatctgagacgacggcttcttttgccgaactgttttgaatgtcactgtagcttccgccgtcaacggattgtttgacattgaatgttgcatcaccgtcataatcccagcttaaggttaatgattttttatctttgtcgtatttcacttgcaatcctgtcggtttatcggctttttctttcgtgtacgttttagaaacggcagttggctgcgttcctttcacgaagtactccgtcacttttttatcatccggcgtattcggtccggctaaagcggcaggattcgagcctttctcaactgtttcttttacgacgctgtcaggctgcttgaagcttcctttaccgtcatcaacgtaagagatcagcttttggaaaatccgttttgcgacttgctggtctgcagaagacagtgatttcttgcctgctttgttgccagactcaactccggtccaaaccgccgctgtatattgaggggtgtatccgacaaaccaggagtctgggactccgcctggagcaatgttatatttttgaatgtcctctttagtaaagttggtcgtacccgttttaccggcgacttccacgttcggcacctgagccagtttacctgttcctgattcgacagctgatttgagcatatcggtaatcataaacgctgtgtagtcgctcatagcacttttcggtttcggtgttaaatcaagcttagtgccgtcattaaattcaatcgatgtgaccgcgtgcggttcgttgtacgttccgttatttccgaacgcactgtaggcgcctgccatggtcatagtagatacaccgcggttaccctcaccaaatcccccgatagagtagggttcatatacttgatctttgtttaatcccaatcctaagtcgtttgcgaagtcgacggcattatcttttcctgctgcttggtatgcttttaaagcaggaatattacgtgagtctgcgagggcctctcgcatagatatctgacctctgtatttattgtcccaatcatgaatcggtgtgccgtcagagtacgtataagctgagtcgtcaatctgctcgtaagtcgaccattttttattttcaatgaccggcccgtaatcaagaatcggttttatcgttgaaccgggctgggttttaccttgtgttgcataattgaatcccccggcagttctgttccgtcccggtccgatggcacggatttctccgtttgtcgtatcaaggagcgtgacgcctccctgcatgccttccgaaaagccaaccgtgtctccgttcatcaattgatcaagataatcttgtgccttcgtatcaagagtcgtgtaaattttcagtccgtcagttgaaatattgacgtctttcttttcttttgtctcaatttctttcataacttcttcgacaaaagcgctgtatttatttgtgtcctttttatcgtattccttttggctgacgacgccttcatctttcatggacactttctttgctttttggtagtcagaatttgaaatgaatccttgtttttccattaagctgagaacaatgtttcggcgtttttcggaagccttcggatttttaaccgggttatatccggtcgggctttgcggcattccggcaagcgtcgccgcctgttcaaccgtaagcttgctcaaatcttttacgccgaagaattcttcagccgctttaccgacgccataggcacgcggtgagaaataaattctgtttaaatacatttctaagatttcatctttagaataatggcgctccagctgcagtgaaagccacacttcctgtgctttccgtttaatcgttttctgatgggtcaaaagtgagtttttcacaacctgctgggtgattgtgcttcctccctctgaaccgaatccatccgtaaagttggcgaccaaggcgcctccgatccggatcgggtctataccgtggtgcttataaaaacgggcgtcttcagttgcgataaatgcttctttcacaacatcgggtatatccttaatcgggacgtaggttcgtttttcaccgcccacttccgcgatttctttgccgtttttatcgtaaatcgttgaagagtaaggcgttttcagcttggcttcgtccaaagacggcgcgccggaaaccaaaacggcaaatgccgccgctccgccgactatgcccaggacaaacagaataaccaaggacagtacaatctttttgaataaaccgcctttacgctgtttcttgccttttttcggtgaagagggcttagtgcttttcgtctgccttgccttacggcgttcttcacggctcgtaaattgatctgacataacatctcaacctttcgtttatcaacctttcgctcagtctactgttcctgcgaaaaataaagctgttcaataatactaatataatcaattctcggtgagtatccaagggaaatcggaaaggaagcatcttctaattcgtctttgcgaattgattttctgccattgttctcctttctctcccaaaagacaaacagcttgtcggcttcgaggaaataaacctttccgaaagcggatataataacaaaacaaatgccgtcttgtctgaccacctgcttcatatgctcaatctgatgatcatgaaaattctgcaggggaaatgccgttttgttttttgtttcttttgcctcaaaatcaatgtagcgccctttataaatgccgttgtagtcagttgtggaagactgtttaaaataagcttccttaatgactgcggcgcttcttttcggatagtggacgtttacaatctggacgggtgtcggctttttgtgaatgacagcaatttggttagccagataatacttattcgtttcattcaggtcgtcttcgagggtcatgccgcgattactgtatgaatgggaccgtttctggctgttttgggatgaaaccgttttgttcggctgaaaagtttttccattcgggtaccgaatcactttttccatcctccttatcaaactaatagtgacggaagtgaatgaacgtgcataaacgacagaccgtaaccgccattcttcgcctgatcgaaaaagagacgaaaataaaaaatgccgataatatttcccggacgaatgcctataaagcatattatgaccgccatcctgagatcaagtggccgcttttggcatcgtttgtgtcccgcaatgcgggctggtcgatgactgatttaagaggcgtcctttatcaggagggccttgacagcagtcagaaaaactggtttttcctttcgtatgaaagggcgaattggctgattttttctgatgcctatcctcagcttctggtctaccagtggtcaaaacaaatcggcgaacctcttttccgtcatcttccttatttccgcgtctcggcttttatgcaggaagaatggttccgcttttggcgtgacggagatacggaacggctcatgtatgctcttattataaatgaacaaaacactatccaagcacctattatacaaaatccttcgtttaaaaagaatgtttttggcacgattcctttttatttaagtgattgttttcactttaatacggtgatattcccttcatttgacggacatttatacggaatttccgtcaaacggttttcaaaaaccgaagaaagaattacgctcggaaaacagctggcccgccttctgttcagccctgatcttcacgcttctttttaccgttttcttgataccgttcctcataccggttcacgctttgatatggagaaaatgatcggcatcaaaaaaagaacatcaccgatgctgaggacaacctatcccattgttgcccacccattagacggcgaaagggcggattggtttcaaaaaaggttaagaaaaggggctttcttacaggagaaaatgccgaaacagcttgaactgacggactggtacttccagaaaagacgggagctccatgcgctcttcgcggttaaagagtggctgaagaaatgaaaaagcccgaaaccgttcgctggggtttcgggctgctgatgtgttacgtggaagggcggtttgggccgcctaattttttatcaagcgtatcagtcgtttttgcttcggttttttgctgtttacctgcatttttcggtctcgttttcatacggcacctcctcaactgtatcgtttgcattaacgtgccggttcatacaaagtttgcggcacttttttgtcgaaaggcacgccttttaggataatctctgtttgtttgccgaactgcttctagttttgtcatgtgcagaggagagcggtatgaaaacgagaattatattctaaagagacgcaagtgataaaagggaggaacatgaatgtctgtttacacgagcaaggctgatattctccgtctgctttctgatattgaaatccggatttctgctgctgaaaagacgcttacccaagcagtcagatcctgtcaggcggaagctgaagaaatcagacaggagaaactttcccgccttgaggaagaggcgcgggagcttcatgtttgtattgatgacctgtttttggctgaccggcgtaaaaaggatttgccgagagcctgccggatcagctgattttatgcaaaaactttggtaccatatgtactgaggtgagtccgtttgcagacacagtcgttattggagctgacagaacaaatgatagaggcggttctggaagccgaaaaaaggtatcaggatggaaaagagtcaggccgttcatatgatttttttgagattataaaacccgatgttgaaaaaagagaccggctttgcgcgctttggacagaagcagcacttgcgtttattcgggaaaaccgtccgaaatacgttcatcacgcacaaattcaggccgttacagaaaatttcggagagctgatgctccaatcatatgttcatcatattcataaaaaaagatacagggatttaactgaatctgttttatatacgcttcgtatattaagggatgaaattgaaaaagaaggcagctgaaaacggctgccttcttttatataaaggggtcgggtatgttattcatacgccgggttttctgctccacttgcttcgagaaccttcatactgtttcgaaattcggttgcggtgagatggccttgaatatagaggaattttgcaaagtccatcagtttatctgcacaatctgtttcatattttttcacttcagcaaaacgctttcttaagtatgatacgttcataatggtgcatcccctctcatgtatgttgagattatggtaacataacgattcgacttttttctgtttttaaaaaattaagactttcgacagcatttgacaaaaatcagaatcaccgaaagcacataaccacggcggaattcatacatatatagcagaaacttagtgagagacaagggggaatgtcatatgcaatggagagcgcagccatatcaaaatatgtaccagcagccggcgggatatttctacccgcagcagatacagccattacagcagccgagtccgcagcagatacagccattacagcagccgagtccgcagcagatacagccattacagcagccgagtccgcagcagatacagccattacagcagccgtatccgcagcagatacagccattgcagcagccgccctatcatcagcaagggcagtacccgcagcaattttatccgaatcaggaatacggtcatatgcagcagccgtttgctccctctcctcctcaggcaggcatgcccggggggcagccggggtttgtgaatccttaccccgttcccagaccgaatcagcagcagtcttcccaattctcaggcatactctcccagtttaaaaaaacgaacggacagtttgactttaataaaatgatagatacaacggggcagatggtaagcgccgtaaatcaggtcggatcgctggtgaaaggcttcaccagtatcttcaaataaaaagcatgaatgatatccatcattcatgcttattttttagggaaaaagagggtaagcgtctgttcattccaggatgtttccatatcttcttcactcaccttatacgggaggacaacggttcttgtcatgcttgaagacacatgggatgaatgagcctgtttatgatcgtagcggattgtaacgtgaaggtagcaccccttcgtttccaccagcatatcaccgtcacggaatgtctcgggaacgctgatatcaaccgcgaggcccgtcggctcttctctgacgtcaatcgtcacttgcgcttcagtaaaagccgaattgacaaggtgctgaaaaccctgcatcaattctgcgaagggacctgagtgaaaaaattggtccatcgcatggctgatgatgtcctcatttctttgcggatcaagtttatcgttttgtgattgatccatatgaccaccgcctttttacaaacagactatgcgatgttatgccgtatggttaagaattgaaggaaaaaagaaagtatggttaaatagtggagaataaactggtaacggattcacatttaggaaggggagcacaacacattgctgaaaaaattattcggattgggagacagccggaaaaagccggccgaggaagtgattttttctccggctgacggagcggtgatggatttggcttcagtgccggatcccgtattttcacaaaaaatgatgggggacgggattgccgtcgagcctgcaaacggagacattgtttcaccggttgagggagaagtgattcagctgttccatacaaaacatgctgtcggcatccgcaccctttccggagcggaacttttgatacatgtcggtttggataccgtcaatatgaacggcgaaggctttgaagcgcatgtaaaagaaggagacaaagtgaaaacaggcgatctgcttttaacgtgccggctggatttaataaaagaaaaagcaagcagcaccgtcatccctatggtgattatgaatggcgatgccgcagaacctttgcaatttgcaggcgcaaatgaagcgaaaaaaggacaaacagagctttttaagataaaaatgaagtaggcaggggctgattccctgctttttttcttgtgcaggattttcatctagccaggcaaacaaatattcggtaaactgtacctcataaagaggtgtgaacgatgaagaaaaaatcattgagcgaactgattcaggaattaaaaaatcatgaaaatattgtgcattggcatgaagaggaaccgcgggaggcgaaaaccatgccgatgccggagcaagtagatcggaaaattcgggcggctctcgaaaagagggggatcgagcggctctttacacatcaatactccgcttttcagacggttcaaaacggagaaagcattgtggctgtcacaccgacggcctccggaaaaacactgtgctataatcttccggttcttcagtctatcgcggaagatgcctcaagccgcgcgctttatttatttccgacaaaggcgctcgcgcaggatcaaaaaagcgagctgaacgaaatcatagacgagacgggcatggacattaaaagcttcacctatgacggagatacgtccccggccatcaggcagaaagtcagaaaggccgggcatattgtgatcacaaaccctgatatgcttcattcagccattcttccccaccatacaaaatgggtgagtctgtttgaaaacctgaaatatatcgtcattgatgaattacatacgtaccgcggcgtattcggcagccatgtggcgaacgtcatccgccgtttaatgagaatctgcgctttttacggaagcacgccgtcatttatctgtacatccgccacaatcgccaatccgagggaattggcggagcagctgacgggaaaatcagtgcgcctgattgacaataacggcgccccggccggaagaaagcactttgctttttacaatcctccgattgtaaataaaccgctgcatattcgaaaaagtgccaccgtggaagtgaacgaacttgccaaaacttttttaaaaaataagatccagacgattgtttttgccagaagccgtgttcgggttgaaattattttaagccacattcaggagatcgtaaaaaaagaaatcggtgcgaagtctgtcagaggttatcgcggcggatatcttccgaaagaaagaagagaaatagagcgggggttaagagacggaagcattctcggcgttgtcagcacaaacgcgctggagctcggcgttgatatcggccagcttcaggtctgcgtgatgacggggtacccgggcagtgtcgcgagcgcatggcagcaggcgggccgagccgggcggcggcagggagaggcgcttatcgtgatggtggcgaactctgatccgattgaccaatatattgtgcgccatcctgattatttctttaaacgctcgcctgaatctgcaaggatcaatcccgataatctcattatattggtcgatcacctgaaatgcgccgcgtatgagctgcctttcagagccgatgaaacattcggagaaaatgatgcaagagacattctcgagtatttagaagaagaaggggtgcttcacgaaaaccgcgaacgctatcactgggcgagcgaatcttttcccgcctccaacatcagtctccgttcggcgtcacaggaaaacgtggtcatcgttgaccggtcagagacggctgatgtaaaaatcatcggagaaatggaccgcttcagcgcgatgacgcttcttcatgatgaagcgatttatcttcatgaaggggtgcagtaccaggttgaaaagcttgattgggatcataaaaaagcgtacgtgcgaaaggtcgatgtcgaatattatacagatgccaatttagcggtgcagctgaaagtgctggacattgacagaacggacagcagaaagaaaacggccttacatttcggcgatgtaaccgtgaacgcacttccgacaatatttaaaaaaattaaaatgacgacatttgaaaatataggatcagggccgattcatcttcctgaagaagaactgcataccagtgcagcctggcttgaattaaaagagacggattcggagatcggcgaaaaaacgcttgaacagctgcttttaggcattgcccacgtcttgcagcatatcgtgcctgtatacgtcatgtgcgaccgaaatgacgtgcatgtcgtgccgcaaatcaaagccgcacatacgggacttccgacaatctttctgtatgatcattatccgggcggaatcggacttgccgatgaagtatataagcgatttgatgaaatcaatgaaggggctgagcgcctgatcagacaatgtccatgtcaagacggatgtccttcctgcatcggctccgaaatagaaggaatagatggaaagaaagcgatactccggctcttgaattacgtgtaaaagaaaagggggacgaaagatgtccttgaaaaataaattaaagcggatgaaaaaccacctgaatgtgccggaagctgaaaaaaagccggcagcttcacaactttcggtcccggatattcaagtcccatttagagaagaatgggaggcattcggagtgaagcctttcttttttgaggatgaatactgtcttatccgcgaaaccgtctatccgctttcgcaccgccacggacggtacagcttcagtgaacttgatgacgtcatggcattatggaataaaggcggtttgacacatactttatcagcagaaggatacgaaaaaagccagctgttcttctttgatactgaaacgaccggcctcggcggcggggccggcaatatgatttttttgctcggtcatgcaagagtgtatgaagaccgtgtcgcggttaaacagcatctgcttcctaaaccgggaaacgagacggctctttacaaaagctttttaagtgaggttgacattacgtcccttgttacgtataacggaaaagcctttgactggccgcaggtaaaaactaggcatacattgctgcgggacaggcttccgaagcttcctgacttcggtcactttgatcttctgcacggggcgagacggctttggaaacataaattagagcgtgtatcgctttcggcggttgaaaatgaagagcttgcttttaaaagggacgaagacacacctggttatttggcgccgatgctgtattttcaatttttaaaggcggaggatccggctcttttaaagggagtgctctcgcataatgaacaagatgtgctttccctcatcgctctttacatccatatgtcaaaaaagatttttgcatcttctgatcagacgtcagaacgtcaggaagcatacgccatggcgaaatggtttatcgctcataaagaaaccgatcgggctgtttcacagctggaagcgctgcaaggcaaagactttgaagattcggatcgggccctttttgacttagcaatgctttataaaaaacaaaaccgcaggcaagacgccgtgcccctttgggagaaactgacgggctctgatcttcacatatgcagacaccaatcagcggtagagctggcgatctattttgagcatcacgcaaaagattataaaaaagctctgcaggccgcacagcaggcggcagaagacggggaaatatcggaaaaagaagccgagaagctccatgtgagaattgcccggcttaagaggaaatatccttcttgaaatattgcccgggaaagcgcaaaagccgagctgtttcgccaaaaatatttttttctgaatccgcatcgattttgttgtagaatggtgccgcatcttgtaaaatagcgttagttatttataggggagagttggtatgtataaaggtgttttttacttgttctttgtcgtggtttttttgattgcgtttgtattttcgaattttaaagacagcttgctgacacacttttaaattgggtgattgaattagaacatgcaccctcttttcttcataacctaacagtgtaatataagttaatggagaggggatttagcatgtttcatcatcattgttgcagaccaaacgtgatgccgccgattgtccatccgactcattgctgtgaacaccattgtttttctaacacagttgtgccgcatattcatccgcaacatacaactaacgtaaatcaccacaactttgagcacgttcattactatccgcacactttttcaaatgttgacccgacaactcaccagcattttcagtgcggaagcccttgctgcgatcattagtattgaacgcttaagcaagatcggttaggatatcagcaaatcaaaatggggcccgatggggagccccattttttaagcaggtgatcaattgaaagtattagccgtaacaggatacaagccgtttgaactcggaatttttaaacaggatgaccgggcgcttgtttatataaaaaaggcgatagaaaccagactcagaagctttattgacgaaggcttggaatggattctcatatccggacagctggggactgagctttgggcggctgaaacggcgtacgatctcagagaagagtatccggaattaaaggttgccgttatcacgcctttctacggccaagaagaaaagtggaaggaaccgaataaagaaatgtatgaagcggtgcttgctcaggcagattatgaggagagcctgacgcatcggccgtacgaaagtccgctccaattccggcagaaaaacgcgttctttattgaaaagtcagatgcgcttttgcttttatatgatcctgaaatggaaggatcgccgaaatatatgctgcagcaggcagaaaaacgccgtgaaacagacggatatccgatttattcgattacgatggatgatctccgtgccgccgttgaagaagaagatttctttacataacacgtcagagaatatttgacaacgggacgtgtttctgaataaaatataacatgatgattcacgatatgaggtgaaaaagatgcttgctgataaagtaaagctttctgcgaaagacattttggaaaaagaatttaaaacaggcgttagaggttacagacaagaagacgttgacaaatttttagatatgattattaaggattatgaaacctttcatcaagaaattgaagaactgcagcaagaaaatctgcagctgaaaaaacagcttgaagaagcaagcaaaaaacagccggtgcagtccaatacgaccaactttgacattctgaaaaggctgtccaaccttgagaaacatgtattcggcagcaaactttatgacgaatagggcagatgcacttgtcaaatgagacaagttgctttataatgaacaagtgttcttaacgttcgggtaatcgctgcagatctttgaatctgtagaggaaagtccatgctcgcacggtgctgagatgcccgtagtgttcgtgcctagcgaagaaataagctagggcagccttgataggctgacggcaggaaaaaagcctacgtctccggatatggctgagtatccttgaaagtgccacagtgacgaagtctcatcagaaatggtgagagtggaacgcggtaaacccctcgagcgagaaacccaaattttggtaggggaaccttcttgaaggaattgaacagatagaaggacagaatgctttctgtagatagatgattgccgcctgagtacgaggtgatgagccgattgcagtacgacggaacaaaacatggcttacagaacgttaaacattattgatatgacaaattagagctctcctttaaaggggagcttttatcttgaatgagacgaaagcttaaaagagacagggtgatacgatgaagaagtacacactaatagcgacggcgccgatgggaattgaagcgatcgtcgccaaagaagtgcgtgatttaggttatgaatgcaaagtagacaacggaaaagtcatttttgaaggagatgcgcttgcgatctgccgcgctaacttatggctgcggacggctgaccgcatcaaagtacaggtcgccgagtttcaggcgaaaacgtttgatgagctgtttgaaaaaacaaaagcgattgactggcgcgcgtacattccggaaaacgcaaagttccccgttatcggaaaatccgtgaaatcagtgcttgccagtgtgcctgactgccagcggatcgtcaaaaaggcgatagcggaaaagctgaaacttcaatcaggaaaacaaaatgaatggattgaagaaacgggccccgagtataaggtggagatttcccttttaaaagataaagccgtgcttacactggattcatcaggaacaggccttcacaaacggggatacagggttgatcagggaggagctccgattaaagagacgctcgctgccgcgttaattcagttaaccaactggacgcctgaccgtccgttcgtcgatccgttctgcggttccggcacgatcgccattgaagccgctttaatcggacaaaacattgctcccggttttaaccgtgattttgtttcagaagactgggaatggatcggaaaagaactgtgggacaaggcgcgtcttgaagtggaagaaaaggcgaactatgatcagccgctgcagatctttgccagtgacgtagatcaccggatggtaaacatcgccaaagaaaacgcagaagaagcgggactcggtgacctgatcgaatgcaagcaaatgcgggtgcaggattttacgacgaaactcgaatacggcgtaatcgtcggaaaccctccgtacggcgaacggctcggcgaaaaaagggaagtcgagcagatgtataaagaaatgggccgggcatttgaatctcttgatacatggtctgtctacatgttgacgtcaaatgaacaatttgaagaggtctacggaagaaaagcaaccaaaaaacggaagctctttaacggttttatcaaaacggattattatcagtactgggctaaagtgcggccgcagcggaaaaagccgcaacaaagagaagacgcctgaaacagcgtcttctccggcatctttacgttttattctgccattaccagcggtgcgcttttgcgttgctccgtaaaataatgttggtctgggacatttcggtgtggccgttcacttgcgatttagagcgtttcggccgcgtccaattgtgatgaaacaattcagaatgctgatctaatcgatctttataactcatgtaaccatcactcccggatagaataattttgtgaagatggatattcgatcgaatatctgttgtagtttgtgcaggtcaggtgcggatcattcagaatggcatgtatagaaagtgaagcatcggcatagaatgatgattatttctatttgagaggtgatctattttatgctgaacagcgagcacttcagtaaaatacaaaaggcgttagacgcaactgctttccggctggaggaagccggagcggagttcggtccttccgccatgacacacgcacaggaagaacttgaaaatgcggtaaaacatacacattcaacagaccatccgttcctatgtacacatatcattgaccggaaatgataatggcaaaaacttggcgaggccaagtttttttgttgtattgaaaagggttaaatgatattatagatggtctgaatgccgaatagttaggggttggagttgggtgacaacatcacgtttgccttttgctttaacaaaagaaaagaatttttacgaagaattgaacaattggattggtgacgtgttttacgatatccttcccgagaaaggctttgaccttcgggatgagcaggtatttatggcgtttcagcttgaacgggcatttaaagagaaaaaagtcatgttcgctgaggcaggagtcggtacggggaaaacgctggtgtatctgctgtttgccatcagctatgccagatatacgggtaaaccggccattatcgcatgcgccgatgaaacgttaattgaacagcttgtcaaaaaagaaggcgacatttccaagctgacagaacatttggatctgcagattgatacacggctgtccaaatcccatgagcagtatttgtgtctgaaaaagcttgagaaaacgatgcagcgttctgatgatgaaaagtggctggatctttatgagtcgctgccttcattcgtacacgagtcacaagcgatgcagcgcttttatccgtacggcgaccgcaaacagtacgctgatttgacgaatgaagagtgggcaggcgtcagctatgattccttccaagattgtttaacttgtgatatgagacatagatgcggtttaacactttcgagagatcattacagaaaatcaacggatctgattgtttgctcccatgatttctacatggagcatgtatggacggaagaatcacgcaaaagggaaggacagctgccgcttttgccggatcacagcgccgtcgtatttgatgaaggacatctgctggaattcgccgcgcaaaaagcgttaacgtatcgtgtgaagcagtcgacgcttgagctgtttttagagcgtctgcttcaaaatgacatcagagaggaattcgccgaactgattgaagatgcccttgccgcaaacgatgagtttttctatgtgctgtcagaggaatcgaaggaaatcgcaggctctcaccgattggacatccaaaacgaccagcgtgttaagcgtgcggctgacgaactgtgccgtctgctcgataaaatcggcgaggcgctcgtatttgaatcggaaatgtatacgatcgataagtacgagctgtcagttgtagaagaatacgtcgaacaaatggcatattcgctgtcgctgtatcaaaaggatgccatcagctggcttgaaacgcgggatacagactcaacgtttgttgttatgccgagaactgtagccgaagttttgggagaaaaggtcttttctaaaaagattccttatatcttctcatcggccactctttctgagggcggttcatttgattatatcgctgacagcctcggaatccgtgatcctttatcattcaccgttgaatctccgtacgattacgaggagcaaatgtctgttgcgcttcacggtgacatgacgtctgagcagaaaacagccgaaacgattgaaaccattaagaagaatgaaggacgcaccctcgttcttttcccttcctttgaagacatgaaggaatttaaagaacaggctgccgcgtgggagctgccgtatccgatatactacgaaggtgacgaagagatctccagtctggtcgaaaaattccagcgggatgaagaatccgtgctttgttccgtccacttatgggaaggtcttgacattcccggtgactcgctccggaatgtgaccatttgggcgttgccgtatccgcctcatgatcccgtgtttaccgcaaagcggaacggagcgaaaaaagatccgtttgaggaagttgatctgccgtacatgctcttgagagtccggcagggaatcggccgcctcatccgttctaatcaggacagcggaaccatatccatttatgcgggcggagaaagtgaacgggtcttggccgaagtcaaaaagatcttgcctgttacaccgaaaatcgtataaaaacaaaagctgcaggattcttatcctgcggcttttttaaatccgggaagttgactttatcacggcattccattagcctgtaattgatagtgaaaagggaggggaacggatatggatttacatacatatgaaaaagagttttttgatctgttaaaaagagtatcccactatgtcgaagccattgcacttatgcattgggacttaagaacgggagccccaaaaaaaggctctgatgaccgggcggaaagcatcggacagctgtcggctgacgtttttcaaatccagacatccgaccggatgaaagagctgatcgacatccttctcgcgcatgcagaggagctctctgaagatacagtgaaagcggcggaacttgcgaaaaaagattatgatcataataaaaaaattcctgaagatgagtataaagaatatgtcattttaacatcgaaagctgaaacggcttgggaggatgcaaaggctgcctctgatttttctatgtttgctccgtaccttgagaagctgattgattttaataagcggtttatttcgtattggggctatgaagatcatccatacaacgcattgctcgatattttcgaaccgggtgttacggtaaaggtgctggatcagctgttttctgaattgaaggaagcgattattccgcttatcaaaaaagtgacggaatccggcaataaaccggacacttcctttataacgaaaacgttttcgaaagaacaacaaagagccctctccttgtatttcttaaaagagttcgggtatgattttgacggcggccgcctggacgagacggtgcatccgtttgcgacgacaatcaaccggggcgatgtgcgggtgacgaccagatatgacgaaaacgatttccgcacggcaattttcggaacgattcatgaatgcgggcatgcgatttacgagcagaatattgacgaagcgctgagcggaacgaacttatctgacggtgcatccatgggaattcatgaatcccaatcgttattttatgaaaactttatcgccagaaatcaacatttctggaccgcctattatgaaaaaatggttgaggcttcgcctgatcaatttcaagatgtgaaaagagaggactttgtacgcgccgtaaatgaggcgaaaccgacatttatccgaattgaagccgatgagctgacatatccgcttcatattattatccgttatgaaattgaaaaagcgattttcagcaatgaagtgacagtggaagaactgcctgcattgtggaatcaaaaatatcatgattatttaggcattacgccgccatctgacgcaaaaggcattttgcaggacgtacattgggcgggcggagatttcggctatttcccttcctatgcgctcggatatatgtatgcggcacagctgaagcataccatgcttgaggatctgcctgaatttgaccaattaatagaacggggcgattttgagccgatcaaacaatggctgacagaaaaggttcatcagcacggaagacgcaaaatgccgcttgacatcataaaagatgcaacgggagaagagctgaacgttcaatatctcattgagtatctcgtcggcaaatattcaaatttatatttataaacgaaacgcccggcatacaccgggtgtttttctaaaaattctaaaaacacgaataatcgaaaaccaattctttgtaaaagttcggaaatattcaaatttcactatgcaaaagaagtgtatcttgttataatttgattaatatcatacgaacactcatataatcgcgtggatatggcacgcaagtttctaccggtcaccgtaaatttccgactatgagtgagcaatggaacggctttattcggccgttgcgtgtagatcattcggcattgcttgctctttttttggagagcgggcaatgctttttttattttttataagcgggggtaatcattgtggaagcattaaaacgaaaaatagcagaagacggaattgttctttctgatcaagtgctgaaagtggattcttttttaaaccatcaaattgatccggttctcatgcagcagatcggccgggaatttgcgcgccgttttgaaaaagacgagataaccaaaatcgtcacaattgaatcttcgggcattgcccctgcggtgatggccggccttgaactcggcgttcccgtcatctttgcgagaaaaaggaagtctctcacattaacggatgatctgctgacggcatccgtctattctttcacgaaaaaaacagaaagtcagattgcaatctccggaaatcatctgtcgaaagatgaccgcgtgttaatcattgacgactttttagcgaacggacaggcggcagaaggacttttatccatcgtaaaacaagcaggcgcagcggtttgcgggatcggaatcgtcattgaaaagtcatttcagccgggaagagatgagctgatgaaaaaaggatgccgggtcgaatcactggcgagaattcaatcgcttgaagacggaaaagtgacatttgtacaggaggtccgttcatgaaaaacggctatgccaaaacactttcactcggtatccagcacgtgcttgccatgtatgccggcgccgtcgtcgttcccttaattgtaggagcggcattgggactgaacgcagaacagctgacatatctcgtatcaattgacatttttatgtgcggggcggctacgctgcttcaagtatggaggaataaatgtttcggcatcggcttacccgttgtgctcggctgtacgttcaccgcggtagcgccgattatttccatcggtaaggagtacgggatttcagccatttacgggagcattttggcatcgggtctgcttgtcattctgctgtcgtttttcttcggcaagctcgtatcctttttcccgcctgtggtaaccggatctgtcgtgacgattatcgggatgaccttaatgccggtcgcgatgaatcatattgccggcggggaaggcagcaaggatttcggtgatccggctaaccttgccctcggatttacggtgctcgtcatcatcgtgctgctttatcggtttacaaaaggatttttgaaatccatttcgattttaatcggcattgtcatcgggacggccatcgcatattttatgggaaaagtgcaatttgacaatgtggcgaatgctgacgcaattcaaatgattaaaccgttttacttcgggacgccgacatttcatgcggcaccgattattacgatgtccatcgttgccattgtcagccttgttgagtcaaccggcgtctatttcgctctcggtgacctgacaaaccggcgcctgtctgaacgtgatttagcaaaaggctaccgcgcggaaggcctggcggtattcatcagcggcatttttaatgcttttccgtacacggcttattcccaaaacgtcggcctcgtgcagctgacaggaattaagaaaaacgcggttatcggtgtcacgggcgcacttttaatgctcttcggcctttttccgaaaatcgcagccttcacgaccataatcccgtcttccgtactgggaggcgcgatggtggccatgttcggcatggtcatctcctacggcattaaaatgctcagtcaaattgactttaaaaagcaggaaaaccttctgattgtcgcgtgttcggtcggattgggactcggtgtaaccgtcgttcccgatatgtttaagcacctgccgtcttacttaaatctgctgaccacaaacggaatcgtcgccggaagctttaccgccgtccttttgaatattatttataatatgattcccaaaacgaaaaaaacccttgatgtgacaagggttcaagagggttagtgatccgttttctttaaaataacatcttattttatctagatcgaggatgcttccgaaagtttgctgaactttttgcgaggcatcctctttcatttattattttcattgtttgaatagaaacaaattgagtgatgaggcatccgccttatttcgccgaaaaaccgtcccgaactatatgtacgtgaacgagtatcttgtgcacgaattcttacaaaagagagtaaaagaagggaaagcccctgcttttaattaatccatccttcaaaagttgcgcgatagaacccttcgattatctctactttcttaaggtaatatgtaacaccattcttaacagttgtatttgggatatcccatctatgaaggtaatccattgtaaaagaatctctggtcgcttgtgtcgaaatttttgtttgagttgagtcgctatttgtatgaccagggctagatgcaaaagcaggggcagcggaaacgagtaaagcgagagacaaggcagaaccagttaaaactttttttaatttcattttgaacactcctttgttttttgatacacttgtattattacatacaatacaaaaagaaccaagggtttttttgttaatattttgtgagcgtgaatgtagttaggggagtggatggcgataggagcgatgctttcattcactgttgcggcttatttcagaatattgataagtatatagagaaaaagagttgaatattgctggcttctggtgagctgcagcctttgagtcagtgtttgctttagctattccagcgcttttccaacggggaaggtgcgatatgaaatttaacactgaaacaattgtacaaaagtaaaatctttatttaaaatgttataaatgcgaattttcaatataggaggttatctgatggcagaaaagaaaaaagctttaatcattgtggatgtacaaaaagcctttgatgataaaaagtggggagaccgaaataacgtaaaggcggaagaaaatatcagcaaaatactgaaattatggagagaaaaaggatggacagtcatatacatacaacatatttctgataaacctggttctttattttatccaaaaaatgagggggttgctataaaggaaatcgttaaacctatggaaaaagaagtcattataaccaaaaaagtaaacagcagctttattgggactaatctagaagagcttttaaaagcaaatgatataacaactgtcgtaatcactggcttgactacgccgcactgtgtttcaacaaccacaaggatgagcggtaatttaggatttgatacatacctgatttcagatgcaacagcagccttcggaatgagagatcaaaatgatacatattatgatgcagagactattcacaatatatctctggcaacattgcatgatgaatttgccacaatattaacgactgatcaattaatcaatgattttataaaaacaaactgactaacattatggctaagggcggcggtagggataggcggctgaaaagcatattcaggcgcatacaaggacctctcgaaaaatacggggattaccgactcttttcatcgtcgcaatatcgattgaaaaagccatctgcttcagatgctttttttgtttcttgtaaaccggttttgatcggcggttaacggtctgattcggcgaataacaaaaggctttactaatcagcgaattattcaagattttttggcttatgctgggtctggtgacttttgatttcctcgaatatattggcttgatcatctttttgaggctgaggctctttgttaagacattttggatcgatcacatttttaaggtctttgatggttaaaggcttacagtcatcttttaattcgtaacctaattgtccattagcttataaattggcatatttaattgtgtttatgtttgaaatgccaagaagtcttaaacgcatttcgagttgatctgctgtcagtctcagcttctttaagttttctgagttggccgtcttctataacgaatttaggttttccggttaaaaaagattcaaccagtttacttttacttgaaaccattccatcaaaatcaaagcgctaaaaaggatagacgcagcgattaatgttttcaataaactggtttctaaaatggggtgaacgataatcgtaccgattgaaatcatcaccattgtctgtgcaatggtcatttgtgctatggattttctccctgaaattctcagtaaaatcattccgaatgcaattataattaattcttcccaagcaaatctcatgttatcaccctgggttgtgttttatcaaaaataaaagagcaagtaagaggttttatggggtacttgctcacgaagaattattgcccttacatttaattttattcattttaggtgtttttctgatcggggatgtcctgcgcccctcgtccaaaagaaggtttgataactaaagaggggaggaaaaacattccatggccttttgtttacgtcagcatatatcaagaatagagttaccttaacatgagctggggaactcaagcgtccatagaaatgttctgaaggatctggattgattcttcgtaaagagttgaggctcggcttttggatagacatgtgattcactaaagtgctgcaggatccgatcaaaaaacctatggcaggagagaattttagattatgtgtttttgcgtctaaaagcagaaaacagtacaactgataatgatcatcgggtgaaatgaaattacgcaactaggtgctatatgtaggatcaattataaaaggcagtgaaactagaaaaaggggcaaagcccccttcatattagtaacagtgctcatcattcccataccagattccgttccagaaagaaacttcttttagataccaattgttcatatcctccagaagttgcaaaagcaggagattccgatacaagtagagcaagagataattcagaatctgtcacaattttcaattttgacacttcttaggtacatgttagcaatcatttattctcttatcggcacggtaacatacggattatttttagttgttgcttagaacaaacattccgcgtcatgaaaaatcagcttttgtagacggctgtccaagtgccatcagcaccatggaaggtgatgttgtctaaataataggtgattccattccggtaaattgaagtaggataatcaggtccggaaccattaagtatgaacgtcgccaaagcagatacttccttcgttttactttctgcagaaggtgtatcagcaggacctgcggcaaaagcaggggcggcagaacagagtaaagcgagtgatagggctgagccggctaaagctttcttcattttcattgtaaacactccttttcttttttaatacaattgtattattacatattatgttaaataagtacatgcttatctttgttaattttttgtgaacaaacagataatctatttaaacgcagagatgaaataagtatgatgatgaagcaattatcatctataaatataagatcaggaagtggctgattttctcaaaaatcatctgctcttgcgaaatggggagttgcatgacatttacggaacgggcggtagccattatcaaacagattcctgaaggaaaagtgatgacgtatggtcaaattgccgatcttgcgggaagtccgcagggagcgaggcaggttgtgaggattcttcactccatgagtaaaaagcatcgtcttccttggcacagggtcatcaatgcaaagggcgaaatcggattgagagacgaagagatgttttctgtacagaagctgtctcttgaagctgagggggtagcggtcacgtcagacggacggatcgatctcaatttatacctatatgatccgaatatgtaaaaaaacctgccgtatatcggcaggtttttcagttatatgctttgagccggccagaaaggttttgccggatataaggccattcctcccgaaggatggagtagtaggcggtatctctgagaccgccgtcgacagccggaatgtgtgcgcggcggatcccttcaaattgggctccgatccgcaaaatcgcagtccgtgagcgctggttgcgaacgtcggttttcagcgtcaccctgacagcttgccacacgtcaaacgcatgagtcagcatcagaagtttacattccgtattgacaccagtccgctgcacggcagaggcataccatgtgctgccaatctcacacacttccggagctgcgtccgccggccgcgtaaacacttccgcaaccataaaccgcgtgcttccgacgattcggtctgtttcaagactccgtactgcaaaaggcaatgcaagtcctttttcataatcggaaagcgcacgctcaatataacgctttgtttcttcgattccgtcagggacatgggtgtaagcataagtcgtcctattttctgaagctgcttcgcaaagtgcctgagagtgatcaatcgtcagcagctctaactgaacgagtgaccctttaagaatgacaggtgtcagcatcccaatcacaaccttttttatgaatggatcaagtatagccgaacggtttcttattcaaaagggccaatttcctattaaaatggcatgtcagtgaaatcctcgattcaaacttatgcatacattcaggaaaaaagcggaaacctttatgtaaagaggtgatgggcatggcatatgtgttatctgtcggaacgagcattccgaagtatcatgtctcgcaagaaacggcggcggattttgcgagagggatgtttgccgattcatttaaggatattgatcggctgttaaaagcctttcaaaacggcgaaattgaatcaaggcagtttgtccggccgattgaatggtataaaacggcacggggtttttcagaaaaaaaccggctgtatacggaagaaaccgtcaagcacagtgcggatgcggcacttgattgtttaacaaacccggattgtttaacaaatccctttccatatgaaaaagtggatgcgatcttttttatttccagcaccgggctttcgacacccagcattgaagcgaaagtgatgaatcagcttccgttttctgcgaaaacaaaacggataccgatctggggcttaggatgcgcgggcggagcggccggcctgtccagggcgtacgaatactgccgcgcgtatcctgaagcatacgtgcttgtcatcgcggctgaactctgcagcttaacgtttcagccgaacgacaagtcaaaaagcaacttaatcggaacttccctgtttgcggacgggattgccgcagtactaatgggaggagaaaaggcgaaccgaaacgacgtcaaacagccgcttcttccgcggatattcgccactcaatcggtgatgatgccggatgcggaagatgtgatgggctgggaattcaccgacagcggttttcaagtcattttttcaagagacattcctaccctggtttcacagtggctgaaggacaatgttgatgaatttttatttgaatatggtgtcagtactcacgacattaaaacctttcttgcccatccaggcgggaaaaaggtcattgacgcctatttaacgagtctttcaatgggcaccgggcagcttgcggcatctcggaaggtgctgcaaaaacacgggaacatgtcttccgcaactatttttcatgtgataaaagaacagttgctcaacggacggcagaaagaaaacgaaaaagggctgatcggcgctctcgggccgggattttcgtctgagcttttgctgttcagctgggaaaagggggcttcttaatgttttggctgtttatcatgctggttgcggcccagcggattgcggagatgatcgtggcccggcgcaatgagcaaaaggtgaaaaagcaaggcgcagtcgaatacggagaaggacattatccctttctcgtcctgatgcacgtgctctttttcgtctctcttacagctgaggtggcggcgtttcaaaaaacgctttctccaaggtgggccgccattatatgtattattttatttgtacaggggatcaggtattgggctctattatcattagggcggtattggaatacgaaaatccttgtcgtgccggatgcggagcttgtcagaaaggggccgtacaggtggatgaagcacccgaactacgcggtcgtcatcttagaatttatttttctgccgctgttatacggagcgtattggacactgtttctcttttcgattctcaatgcctgcatgctcactgtgaggattcgcgccgaagagaaagcgctagaagaaaacaccgcaaaatagagattgaaaatcattctcactcatgataagatgtaaatatgaaaatgattctcattcaaggtggtgccgaaaatgacaatgttatttttatttgcagccgtttgtacatacagtgttttaattggtttcgtattgaaaaaagtttcgaataaatcgatgtcttcttaaacatctgcggtttttcctgccgcgggtgttttttctttatcagctgccgatatcggcggcttttttgcgtttcctgaagaaaagtgagccattcttgtgtaaaatgggggagaggtttttttcagagctttctaaaaatgaaaaacgtcatttgatgcgacagacacaaaggggtaaagacacatgacagaagaagaacgccataacagggagattttcagcagaacgggtgccttatacgcacaatttttggatcatcaggatgaaaaacgggccgatcagctcgcggccattatgaaaaaagcggctgatgaagaggtttatatcgcgtttaccgggcattattcggccggaaagtcctctttattaaacacattgctcggtgaagacatactgccgacaagcccgattcccacaagcgccaacctcgttgtcatccggcacggtgaagataaagtcgtgcttcatacgacggacggggcttatgcagagatcaaaggaagttacgataaagaacaagtgcagcaattctgtaaagacggtgagcaaattgaaacggtggaagtctatgccggctttaaggagtcagagccttatgcggcctacattgacacaccgggaattgattcgacggacgaagcgcattttttatctgccgcttcagttctccatcaggctgacgctttattttacgtcgttcattataatcacgtccattcagaagaaaatatgctgtttctcagctccatcaaagaccgtattccgaatttgtttctgatcgtcaaccaaattgacagacatgatgaaactgaaacgaagtttgaagagtaccgcaggcaggtggaagacatgcttgaaggcgcgggaataccgaaagaatcgcttttctttacgtctgtcactgagcctgaccatcctttaaacggcatggaacagctgaaaaaacatctgcagaagctgaaacagcaggcaaaaacaaatttatggtccttaacggagagaaaagtcgcacacttagtcaaagagcatacagagatgctcgtaaaagaagataaaaacggcagcggagagcagtttgacaaacaagaagcacttgtccgttctgttgaagatgagcttaaaaaagccgttcaacaggctgaaacagcagagaaagacatcagaaaagacgtgcagaacatattgcaaaacgctaatctgacaccctttgagatgagggtgcttgcatctgcttatattgaatcacagcagccatcatttaaaaccggattattcttttcaaaagcgaaaacagcttcggaaaaagaaagaaggcatgctgaattttttgccgatattaaaaaaagaacggaaggggaagcggattggcatattatcgacacatttacgaaagcggccaagcggtatgaagcggattcggacgaactgatcaagaaaatccaggcgtaccgcacaccgctttctgatgatatcaccgctcaggcccttaagcagggagcggccttttcatctgaatacgtattaacttatacgaaagacctcgctgaaatgatcagaagggaagccaaaagacagacagcggaactcattgaggagctgaccgcttatgttcagacaaaaaacggaccgctcattgagaacttgaaaaaccggctcgaaaaagaaaagaaaataagggatgagctcgcgcaatcggcaaaagaagaacgcaatgccttggaaaaagcagcccgcgtccgcgctttgtgggaagaagaattgacctgtgatacgggaagcggcgactggtatacgcgaaaaaaacgccttgcaaaagcgcccgtccaaaagaaaccaaaagaggctgtacagcatgaagtaagcaagcccgaaaaaaatgcgatgaaggaacttcctataaaagagcagactgatcggttctatgagcttgccgggattcttgaatcctcgagcatattaggaaaacaggcagaagcctttcgaagcaggattgagcggcttgaaaaccgccagtttaccttggcgttattcggcggattcagttccggtaaatcatcatttgcaaatgcgcttgtcggtgaatacgtgctgccatcatcaccgacgcccacaacggctacgatcaacaaaataacgaaaccgcaagacggcaaaccgcataaatctgcggagatcgtttttaaaacggaggaggagctggacgctgaaatgcttcagctgactgagctgaaagacgctgatgtaaaggggcgttcactgaaagagagatggaattatgccattaaaaagggaaaaattccggatgaactcatcccggtgattcagacgatgctgcaggcgtttgatacgtacgaagaacagatccgtcaaaggctgacactgacggtgccggttgaagatttaaaaccgtacgcagccgaagaaaaaacggcctgctgcgtaaaagaagtcaccgtgtattatgattcgcctctcacgcaaaaaggcatcaccattgttgatacgccgggagcaagcagtataaacaagcgccatacggaacttgcctttcaatatataaaagatgctgacgcgttcttttatatgacgtactatcagcattctttttcaaaaggagacaggtcttttctgaagaaactcggcctcgtcaaagaatcattcggcatggataaaatgttttttgtcattaacgccgccgatctggccaaaaccgaaagcgagctggaaaccgtcaaagactatgtccgctcagaactctcaaaagagggaattaaccggccgaaattatatcatgtttcaagtaaagaagagcttgcgggtaaaaaagaagctttttataacaggttctctgatgtaagaaccgggcttgagcactttattgaggaagatgtaatgagggccagctgcgcccagctgaaaacagaggcgggcaaattgtgcgatatggtggaacagcttcacgaatctcttcaccagtcggcagaagaaaaagagaaaaagaaacagcgtctggagtcttcctatgaaaaagctctcgctgacatttcaaagcgccgtacgtctgaggtcatcattcgaaaagtgatgaaagatacgaaagaacagctctatcacattaaacatcgcctgacgttttatgcgaatgatatgctgaaaaccgccttccatccgggtcttcaaaacggtgattggaaacaaaatatatcagcggcgctgaatgaagcgctcaaggaattccgttttgaatatattcaagagctgaaaacgctcgatatccggatgaccggttttattgagcgtcatatgactgaggaatggatggaaaactgtcagaagaagcttatggaagacggaaatttctccatttatgtgagcggtgaaaacgaatttgccgttcagctgaaagaggtcgctccggtcattgacgtctcggcattctcacatcacgtaaaggaagttaaatcaccgaagcagttttttgaacagaacggaaaagcagcgtttgtagaagggctcaggctcagcctgcaaaaagtgacagaaaagtggcttgagcaggagaaagaaagcctttcagagcgatatgctgagcaggtgcgccgtctgcaagaagacatggcggataaaagcctgtcccagatccgcgagcagcgggacacttatttacaaggtcttgcggaaaatacgagtgcaagggaaattgaacacctttacgaagccgaaaaagcatggaaaaagaaagatgaaatgctgaaaatttaaaaatccggttggcgggcagataacagtcatggtagactaaaatgaaaaaaagcgagatgaaaccttttatgtcagaagtccataaagcaatttcagcacattccgcaaaacagcatcagcacgtcaaaacatttgtacagcttgattatgagcgtgaacaggccattgaagaagcaattgtaaaatgcagacagaataaaccgttcacgacagatgccatcaatggcatcaccgcaaaaatgaaccagctggcgaaaaagggcatcgtgccgcaaagacgattcgtaagtgaagagatggtgaaagaattcgtcagcagacagtaatggatgaacctgccgcgtgtgtcatcagcgcttgctgtacatactatccgtatcttctctaaagggggatatgaccatgggcagaacaaaactgggaaacagaaatgctcagcagaataacaatgccaaaaagaaaaacggcttcggacagaaatttgattcttatgccggccgtgaagctgaaaagctgatggcaagcaataaaagacacggtgaataacgtgacggcagcatcttccaaatggggggatgctgtttttttaccgccttctttggtaaaataggaacattgaataaaaaggagtttcgatatatgaataataaattactgctcgttgacggcatggcgcttttgttccgctcgtttttcgcgacggccgttcatcgcaattttatgataaatgaaaacggaattcccacaaacggcgtcaacggttttttaaagcatcttattacggcggttgatacgtttcagcccacacatgtcgtctgctgctgggatatgggaagcaaaacgtaccgcaatgatttgtttcaagattataaggccaacagaagtgaaccgccgctagagctgattccgcaatttgatctagcgaaagaagcagcgcgagagctcggttttttaaacatcggcataaaaggctatgaggcggatgactgtatcggtacgctttctgccctattttccggggaagcggaaattacgattgtaacgggtgataaagatctgcttcaattgctgaatcatcaagttcgagtagcgctgctgcaaaagggtatcggcaattataaggtatatacagatgagatattcagagaagaaacgggagttccgccaaaagcgctgattgacattaaggcgctgatgggagacacgagcgataactatcccggcgttaaagggatcggggaaaaaacggcgtacaagctgatccgtgaatatcaaaacatagaccggttattagaaagcctcgctctcttgccgaagggccagcaaacgaaaattcagcaaagcttgaaagaattggagctgtcaaggcagcttgctgaaatacattgcgaggtgccgttagtctgtacgcttgaagaagcgcttttttcattaaagatggaagaggctgcattaatgctgagacgtcatcagataaaaggaattgaaaggatgctcgaaaagctgaacgccagagagataagctgatccctctagcgttttgtattgcttttttttgcgttgttttcaagggctgatttcgggtctttatgcgcatttccttccatatttccctgaggattcacgcccccggtcagctggcctttattttcttttctcatagctgttcacctcatttgtaggatgaacagtgagacgcaatttcattccggttatttattcagccgaatcgctttttttgcaagctgatcggctgtttggttttgtctgccgggaatccacttaatgaaaaacaatggaaatccggactttaagcggatgatttcgtcaacaaacggctggaaagccttgtttttaaccgcttcaagatctgcggcccgctccacgatatccgaatccgtccggaatgacacggactcatatccgcgggcggcacacagcttcattccttcaattaaagcgagaaattcagcttcctgatttgattggtcgccgatcggaattgagaaagattctgttttcccgtcatgtttaataaaaataccgataccggacgggcccgggtttccggcgcttgcaccgtctacataaatttcagcgggcatcatccgtcactctccattcggtgtcattcgttttgccgcatacgcataagggacagaaatgagtgataccgcaaatttaatcaggtaagttgaaatgaagatgctgaaccatactcccgcggaataaacgccgataaaggccacggcagtgaagataaatgtatccagcagctggctgagcgccgtgcttccgctgtttctgagccagagaagcctgtctgaaggaaagattctccgaatggctgaatatacataaacatctatcgtttggctgaaaataaaagccaagaggcttccgagcgcaacacgcggcagaaaaccgaaaatcgtctcaagggcaggctgtgcgatatctgatgcagccggtttatataaaagagccccctgcatggcgcatgtcaaagcgagtagagtggaaaacccgagccagacggctttgcgcgcttccctgggaccgtatttttcattcagcacatccgttgcgaagaaaacggtgccgtacatgatatttcccagtgtcgccgtaagcccgaacagctcgactgttttgacaacctgcaagttggcgcacaccgtggcgaaaccgatccatacgaataggcccgttttgccaaatcctttataaaacagaagaacaatgataaaatgaatgaccgcaaataagatccataacacatcgttaaacaaaacctgctgacttcctttcaatttgagaatggtttgattatagcacacgcccgtcaactaatgaatggtaaggtgatttcaatgaatcttaagccgtatatcgaaatagaagcaaaaggaacaggccctgtcgcgtttttttccgaagattggctgaccgttccgaaagcgcgcatgcttgcaagagaagtcagccgctttccttatataaaagacatttattttgaggatgaaaaaggcgcgagctggacgcttaaagaattagaaaagcttactgaagagcttgcgcacgaacctgacgacattacagtgtatttcgacggcggctttgacaaaacaagcggacgcgccggactcggaattgtcgtgtattattctctcggcggcaagcgataccgcatacggaaaaacaaaagcttaacgcttcagacgaacaatgaggcggaatatgccgctttatacgaagcgcttaaggaagtgcaggaacttggcgcaagcagaaattcaatcacgataagaggggattccctcgtcgttttgcatcagcttgacggcagctggccgtgttatgatgaaacgcaaaacgaatggctggataaaattgaagcgctgctcgaatccttaaagctgacaccgacatatgaagccgtaagccgaaaggaaaatcaagaagcggatgaccttgccagaaaaattctctcggaccggcagattgaaagccgcataacattagaaggtaacggagatgactgatattggataaaaaaagcatttataaagaattgacagagcttcaggatgaatattgcaaagactgtttcgtaaaaaagcatttccgcaaagagtttggaaaaacgcacgctcattctttctgcatcaaccaatgcacagtgggggagaagctgaaagcctacggcaaggtgctgacaaatcaataaaaaataaaaccgcagcttctgcggttttatttttcgaattcatcgagctgatgctggcaatcgtcgagaagcattcgctgcttttgcagaaaaccctggtcgagagcttgcagttcactggattgtgacatcgttctggcatcctgaatcgcttggtaagcagattccaccaaagttgaattttggccccgggtagccgctcccgttgttttctgggccgtttccaccgctaattcaagctggcgtttatccgtcagtccgtttggaaaaaattcagagtccattaaaaaacacctccgcaaatagtttggagattttttttagaaatatgtacggaaaatagaaaaaaatatagaaaataagccgatataactattgaacctgattaattagggcttatttactattattcagggtatcttgggagagaagggaaaaaccagccgtgaatgataaagatttaaaaacaatccttcagcagacatttaaagaaatatacggtgatttgggaagtttagcggaaatggcaaaaaaaggaatgccgtcaatggagaaacaaattgaagaaatcgagcagcgctgcaagcagaatcttgttgcaattgagattcagacggcaatcaaataggagaggcatacgcctctcctctatttgtcatctgatcaacatgtattgagtttagagttttacaacattagaagcttgaggtccacgattaccttcgacaatttcaaaagaaacttcttgtccttcttctaatgatttgtatccttctccttcgatagcagtgaagtgaacaaatacgtcgtctccgccttcaacttcgatgaagccgaatcctttttcgttattgaaccattttactttaccgttttgcatattgcttaattcctcctagtactgtagcaccttcgtgctaaaaaaaattttgtcatcatccaaccgtacgtatgtaaacgttgttaaatgatggttcaactatacaccatatgggagcggacgtcaagcagccgctccctattttttatctttatttttccagtcacaaagcttaaccggaaaaaaacaaaaagcacacgaatcgttcgtgtgcttttcttttacgataatgccatatctgccttcccggccatcatttcagattcttttataatgtcctgcaaaatgacttcagaagagttggggaggtgaaggcttttaatattgtccttcatccggttcagcttctcctcatccgcaagaagggaggtgaccgactctaaaatttcttcgtggcggttgaccacgacagccgcaccgcgatcttcaaagaaaatggcgttttctttttcctgtccgggaaccggtttgtacaaaataacgggtactccgatcgccgttgcttccgtcagtgtgatgccgcccggtttcgtgatcatgcagtctgtaatacggaacagctcgtcaattctttctacatagcccagaactttcagccggtcggcattgtcaccttccaagctgctgagggattctttcagcgagctgtttttgccgcataccaccacaacctgcacctgatcgtcatgaacgagattttcgcacagttcttttacgtttttcagcacaccatgcgctcccgccataataagaagaacttttttgtcgggagagagattgtattttttataaatcggctctttcggcatcgattcctcgaattgaggcctgatgggaatgcccgtgatctttacgttgttcgggtgagtgccgatttcaatcagtttttccttcacgtaatctgtggcgacataatatttatcaacattttcatgaacccagattttgtgaaggcagaaatcggtcataacgttgaacgtcgggatcacttttccggttctccgtctgtattccggtacgacaatcatcggaaatgtattgataataatgtccggcttatgctcttcgacgagctggcctaaacgtttatttcccattttaaaataaatattgaatttgcgtttattatagattttgtcaactccgtaataaaacaaacgataaaactgtttcccgattgagaagctttttaaataaaggtattgagtaacctctgaaacaatcggatttgactcttgatacaaattggaaaccgtcacatctaagccgagacgcagacactgttcgtagagcgttttggccacttgaacatgcccgtttccgtaatttgcagtcaaaattaatacttttttattggtattcaagtaaattcacctcaatgtaatcaacaacaagcaagcttcatgcatcgtaaggagttattgtctatagataaacataacacaagtgcatcattttataataagcgcggcaacatatttaaactaaatttaattgatatgttccattattttaaagttttgttatacgcatactgaatcaagagtattttatcatatttttgtcaccgtatcactcaaaacaaaaattaatcccattcatacggggtttcctgatatacgtaataattcagccaattcataaacaataacgttgcatgagctttccagcggttaacaggttctttcccgccgggcgcaaaatagtgcttaggagcttctacgtttgaaagatttctctctatgtctctctcatactcctgaagtagcgtatcggtatcatattccggatgacccgttaagaaaatctgtttttcgtcttttgaaacgattaaacagacccccgcttcctctgaaacgctgagcacatccagatccgaagccgattgcagctgctccgtattaatatctgtatgccgtgagtggggcacatagtatagctcgtcaaatcctcttaccaatctctcatgttttttaagaacggtatgctcaaacacaccgaagatttttttcggcagctccactttctcaatgccgtaatgatagtataaaccggcttgagcgccccagcagatatggagggttgaagtgacattcgttttgctccattccatgatttccttcaattcttcccagtaagaaacatcttcaaacggcaggtgctcaatcggagccccggtaataatcattccgtcaaaccgtttgtggcgaatgctggaaaaatccgtataaaactcatccagatgctgccttgccgtattttttggagtatgtgtgctcggaattaagaacgtaaagtgaacttgtaaaggtgaattcccaagcatcctgaggagctgggtttccgtttggatttttttcggcatcagatttaaaatcacgatcttctgcggccggatatcctgatgaaaagcccggctttcatccattacaaagatgtgttcactttcaagcacctgcttagcgggcaggtgatttggtatattaataggcaacatgccacctccgttattccccgttaattttcttcattatagaaatttttaagccatttttcaatccatcccggcgtaataaaccgcatttaacgcataatgacggggataaaagcggcaaataggcataaattcggagcggctctttattatgacgggtaaagagccgtttggttcctcgaaaaaaacgttttccgttaagtggaaggaaaaagcggttgccgtttgttttgcagtgtaaaacaggtaaaataaatgaagaatgtaaaaaggagggccgcagatgacaatttacgatataaacgtacggaccataacaggcgaagacatgacgctatcggcttacagaggcaaggtgatgatcattgtgaatacagcaagcaaatgcgggttcacatcccagctcaagcagcttcaggagctctatgatacatatcgggaggaaggtcttgaaatattgggatttccctgcaaccaattcatgaaccaagaacctggaaacgaagcggaaattcaagatttctgtgtgaaaaactacggagtcacattcccgatgtttgcgaaagttgatgtcaatggagcagacgctcatcctctcttcacatatctgacggaacaggcgaaggggatgctcggcacaaaagcggtcaaatggaatttcactaagtttatcgtggaccgaaacggtgaagtcaccgggcgtttttcaccgaacgtcaacccaaaagagcttgaagatacggtgcagaggcttttggcccgataagaggtgatacgatgaacgaaaaagagcagctggaaagcgtcaggaattgggtcagagaaaagcttatcaatgaacgaacgggccatgactggcttcatatttcccgggtcgcaaaactttctgtgtacattgcaaaagaagaaggcgccgacttatttatcactgagacggccgcgctggttcatgatctgattgacgccaagctcgaaaaaagcgaaaggctgacggcaggcgaagtgacagaacggctggctgctttcaacattgcggatggctccattcaggagatcgcggatattatcacgagaatgtcattcagacacagggaactgctgataaagcggccgctttcattggaggggaaagttgttcaggatgcagacatgcttgatgcgatcggcgcagcgggcatcggcagggcttttatgtttgccggggcgaagggtcacccgatgtacggaactcaaacaagtgtgctggcccatatagaggataaattaatcaagcttaaaggcttaatgaatacaaaagcgggggccggtttagcagaggagcggcatcaatttcttttgcagttcgccgcccgtatccaaaaagaggccggcatttgcaaaagctaagcggcgcaatagaacgcttgtgccgactatgttagaataagtgtcagattgcgcataggaggaccgatatgaagattaaatcaatagaaccgacgccgagtccgaacacgatgaaagtgattttgactgaagagcttccggcagggaaaagcaacaattacaagcccggtcaggcaggtgatgctccggctgtcgtacgtgatattttaaacatcgaaggagtaaagggcgtttatcacgttgccgatttcctggctgtggagagaaacgcccgttttgactggaaggaaattctgcctcaggtccgttccgccttcggaatggaacatacggagcagtctgagagccgttctgaacaggaatcgttcggtgaagtgaaggttttcgtacaaatgttcagcggaatcccgatgcaggtcaaattgacggacggcgaacgtgaagagcgcttcggccttccggaacgtttccaagaagccatcttaaagctgcgttccgaagcttcaaatgttgtatttgagcgggcttggaaagaacaaggcgtgcgcttcggggattttaccgaaatcggacacgatgtcacagaagagcttcaggccgcctacagtgatgagcggctcaaacgcctgacagaagcagccgcacagcaaaagggtgaggccaaacctgcagtgcagcggaaagcttataaagtgactttggacatgctcgatgatgaagactggaaacagcgctatgcccatcttgagcaaatggatccggatgaagacgatttaccagtattggaaaaggcgctgtatgatccgaagacttcgatcagaagacaagccgtcgtttatttgggaatgatcgaaaagccgtctgtgcttccgctgttatacaaagcgcttgaagacaaaacggtgacggtcagaaggacggcgggtgactgtctgtcggatcttggcgatgcgagcgccatcccggccatgacgaaatcgctcagtgactcaagcaagctcgtgcgctggcgcgcggccatgtttttatatgaggtcggcgatgaaagcgcgctggaagcattaaaagcggcggaagacgatccggaattcgaagtcagcctgcaagtcaaaatggcgattgaacggattgagcacggagaagaggcgaaaggttcagtctggaaacagatgactgaaagcagaaaaaaagaacagttataacaaaaaggtgcgcccatgcaccttttttatttgaattcactttttataaaaattatttagaatattgttgaaaaatgattcaaaactctatatagtaagtacaatattaattgttggagggtttttatcgaaatacagaaagaatagaaaagcgagacagggcaaagacactgtaaaatttgcagaacgcgccctagaataaactgaaaattttaaaaatagtgcacagtctaaaaacagtagggggatcaccatggcagaattacgcagcaacatgatcacacagggaattgacagagcgccgcaccgcagccttcttcgcgctgccggcgtaaaagaagaggacttcggtaagccgtttatcgcggtctgtaattcatacatcgatatcgttcccgggcatgttcacctgcaggaatttggaaaaatcgtaaaagaagcaatcagggaagcgggcggtgtgccttttgaatttaacacgatcggagtagatgacggaatcgcaatggggcatatcggcatgagatattcgctgccgagccgcgaaatcattgccgattcagttgaaacggtcgtctcggcgcactggtttgacggaatggtctgcattccgaactgcgacaaaattacgccgggaatgctgatggcggctatgcggattaatattccgaccatttttgtcagcggggggccgatggcagccggccgtacaagcgacggccgcaaaatttcgctttcttcagtatttgaaggcgtcggcgcatatcaagccgggaaaatcggtgaaagcgacctgcaggagctggaacagttcggctgcccgacgtgcggatcttgttcgggcatgtttacggcaaactccatgaactgtctgtctgaagcgctcggtctggcgcttccgggcaacggaacaattcttgcaacttcaccggaaagaagagagtttgtgagaaaatcagcggcccaattgatggagaccatcaaaaaagacattaagccgcgcgatatcgtcaccgaaaaagcgattgacaacgcatttgcgttagacatggctctcggcggctcaaccaacacagtgctacatacgcttgcgcttgccaatgaagctggggttgagtactctttagaacgcattaacgaagtggctgaacgagtgcctcacttatcgaaattggcgccggcctcggacgtcttcattgaagatctgcacgaagcgggcggagtctcggcggcccttaatgaattagcgaaaaaagaaggggcgcttcatcttgacgcgctgactgtaacaggccgcacactcggagaaacaattgcgggtcatgaagtaaaggattatgacgtgattcatccgcttgacaatccgtttaccgaaaaaggcggtttggccgtcctgtttgggaatctggctccggacggcgccattatcaaaacaggcggcgtacaggacgggattacaagacatgaaggtcccgctgtcgtctttgattcccaggatgccgcgcttgaaggcattataaaccgcaaagtaaaagaaggagatgttgtcattatccgttatgaagggccaaagggcggcccgggcatgccggagatgctcgctccgacgtctcagattgtcggaatggggcttggcccgaaagtggcgcttattacagacggccgtttttcaggagcgtcccggggcctttcaatcgggcacgtatcgcctgaagcggctgaaggcggcccgctcgcattcgtagaaaacggcgaccatgtcatcgttgacatagaaaaacggattttggacgtacaagtgcctgaagaagaatgggaaaaacgcaaggccgaatggataggcttcgagccgaaagtaaaaacaggatatctggcccggtattccaaactcgtaacaagcgccaatacgggcggaatcatgaaaatataaaacagaggcctgaacaattgaattccggccccctctatagtatccttgacttcatataaggattttagagggggcttttttatgtcaatggcttatgaagaatatatgcgccagctggtcgtgccgatgcgccgtgagctgacgggtgcgggttttcaggaattaacgactgctgaagaagtagaaagctttatggaacaggcagagggcacgacattggtcgttgtcaactccgtgtgcggctgtgcagcaggtcttgcccgtccggctgcgactcaggctgttttacagcatgaaaaagcgcctgatcatacggttaccgtatttgccggtcaagataaagacgcaactgcaaaaatgcgtgaatattttacggggcaggaaccttcctcgccttcaatggcgctgttaaaagggaaagaggtcgttcattttattccccgccacgaaatcgaagggcatgacatggaggaaattatgaaaaatctgacggatgccttcgatgcgcactgctgaaatgcccgaattccgggcattttctttttggagaaaaagatgatcacaacgagttacagaccaagcgaatatacgatacacacagcgcagtcgctcagtgtcaagctgggtgacacttactgcagccgcaataaacagcccattgaaaaaatgctggaacgagcggctagcgatcttttagtcatcggaaaggaacggttcgaactttacacgaagcaaggggagaagttcttttttcacccgaatacagcgatgttccgcgcaaagcggtttttgagaggggaagccgagccgttgttaaaagcagccggattacgcgaaggggattcctttttagattgtacgctcggcctggcatccgatgcgattttggcaagcctggcagtcggaaaaagcggacaagtcatcggcctggagaaaaacaagcttgtctcattgcttgttgaaacaggacttcaaacgtgggaaaccggaatggaggagctccaaaccgccatgaaacgcattcatgtcaaacatgccgactgcgccgattatttgcgggagcttcctgattcatcggtagatgtcatttattttgacccgatgtttcacgaacctgttgaaacgtcagacggcattgcaccgctccgcgcgctggcagaagagggttttaacgaagagtgcatcacgcaagccgtccgggcggcgaaaaaatgcgtagtgcttaaagaccattggaaaagcccgcggtttgaacgatacggcttcaaggtgctgaaaagaaagacggcgcttttccacttcggtgtcatccatgtaagctcatgatatcatgggcttctttttcgttaatcagtgatttccataacgacaaaatatagcagcgtgagaagtgatactgtcgcaaataaagcgttaatcatctcatcccctcctttttctccttcttattgtaagcggtttatccgatcggtcacagttaccaatttcccatattgcatgataatacgctgccggacatgacgccgcgctttcatctatgctaaaataaaggaaaagaggacaataaaacagaggggaacaatctgtcatgaaattgtggatgaaaaagacccttgtggttctgtttaccattgtaacgttcggactcgtgtctcctccggctgctttgatgacagacaagccttcaggacagtcgagcagtcttgagcagaatgattacaccgctttttatgatgaacacaccctgccgggagaagagaaggcagggcgggagcctgaattactgtttcaatcgtatcagcagcagcttctcggtgatgctgaaaatcaatcatttttaaaattcggctgcaaaatttctccggtcattgaagatgattacagaagtgaaattctgccgaaaattgaagatgtgatcacaggacatttagccaagtttcaagatgatgaagcgtatcaggatgtggttatttccagcaaaccgtcggccggaaaaactgaaaaaatttttcatgtgtataacaggctgacgggtgaagatcttttaaggttccacgtccgccgggatcatcctccgcaagacggctactggtttaattttcattaccataccgctgaagacggatttcagtcacatcatgagctcggcagcatttactgggaccgcaatacgccgcctgactggatgagcgtgtaatagcgagaagaaataaaaaaatcatttctgagaaattttgcagaaatgattttttattgtgttacactactaaaagactactttaaaaggatgaaaaaaaatgaaacaatataaagatttgtgccgtcatgtgttagaaaacggagaaaaaaaaggagaccgtacgggaacgggtacgatcagcacgttcggctaccaaatgcggtttaaccttcaggaaggtttcccgatgcttacgacgaaaaagctccattttaaatccatcgcgcatgagctgctttggtttttaaaaggagatacgaatgtccgctaccttcaggataacggagtccgcatctggaacgaatgggcggatgaaaacggagagctcggaccggtttacggttctcaatggcgttcatggcgcggagcggacggcgagaccatcgatcaaatctcccggctgattcatgacatcaagacaaacccgaattccagacgtttaatcgtcagcgcctggaatgtcggcgaaattgatcatatggcgcttccgccttgccactgcctgtttcagttttatgtcgcggacggaaaactgtcgtgtcagctttatcagcgctcagcggatgtctttctcggcgtgccgtttaatattgcgtcttatgcgcttttaacaatgatgatcgcgcatgtgacggggcttgaaccgggtgagtttgttcatacattcggagacgtccacatttaccaaaaccatgtggagcaggtgaatttgcagctgacaagggatgtccgtccgctgccgaaactgcggtttgcgcgaaatgttgattctatttttgattttacgtttgaagactttatcattgaggattatgacccgcatccgcacataaaaggagctgtcagcgtatgatttcgtttatttttgcgatggatgaaaaccggctgatcgggaaagataacgatctgccttggcaccttcccgatgatctcgcatatttcaaaaaagtgacgacgggccacaccattgtaatggggcggaaaacgtttgaatcaatcggacgcccgcttccgaaccggcgtaacatcgttgtaacctcacgggacgaatctttattcccgggctgtattaccgccgactcggctgaggaagtgctcaagctgatcccggcggatgaagaatgctttgtgatcggcggcgcccagctgtacagtgcgctctttccttatgcggacagactctacatgacaaaaattcaccatgtctttgaaggagaccgtttttttccggaatttaatgaagctgaatgggaattgacatcccgcaaacagggagtaaaagatgaaaaaaacccttacgattatgagtaccttgtatacgagaaagtttaagcagggggacaagaattgattcgttacggctgccttgtgatgtacgttgtatttatgttcatgaaaaatattcaggaatatatcaatcaaaaagagcttgacccgcggctttcttttcaaaaacagatgaggctggtgtatgagcggccgaaagcctttatgagaggctgcattgacgtgtcgggatcggcaatcggcattcatcatgatcagccgataccggacggccccgtattgtatgtgcatcccagattgcgcccggctgatcttctgctgcttgcgggacatcttgaagagccggctggttttatcgctggcgagaaagctttccggatgccgtttctcggaaattggctgcggctgatgggtgtcatttgtggcggagacagccgggatgcagtgcttcatgaggcggaagtccgtctgcaaaaagggcaaagtctgattctgtccgaagacggcaaaatcaatccggaggaactggcccttcgtttcgacctcccgattgtgcctgtcagcacttcgggaacagaccggctgctgcggggcagattactgaaacggctgaaaccggctgacattgaattacatataaagcccgcttattttccggccggtcagaaacggctccgtgcataaaaaaagcacagtctctatagagaggctgtgctttttatttcagataaaggggactttgacgcaataaaataaaatacagaaaaacatcgaggcgctgccgcctaaaacaaaactgtgccaaatggcgtgatgatacggaacctttctccaaatataaaatattgtgccggcggaatacaataaaccgccgaaaagaagaaggccgaaaccggggcctgacagcgaagcgtacagcggtttaatggcgacgatgatcagccagcccatcattaaatagacaagcgttgaaaaaatgataaaccgcttcacgaaaaagattttaaacacgatgcctccgatggcaagcgaccaaacaataattaaaagggtcagaccgagcgcccctttaaggggtcctaataaaaatggcgtatatgttccggctattaatacgtatatcgcggaatgatccacaatctcaagaatgtctttcgtttttttatgctgaatgctgtgcaaaagagtcgagctgagatacagcagcagcattgaagcgccgaagattgaaaagctgacgatgtctgtcggcgagccgtatttcaccgcgaagataatgagaaaaataagcgccggaatcgacagcaatacaccgattccgtgtgtgacggcatttgcgatttcttcttttattgtgaacaatcaaatgtcctcctttttaaaggatttgtttttgcagtgactgcaaaaagctcaacccttctaatgtaatttttgttccagcgcgtcctcggccttttgtcacatagttcatcttttctaagtaatcaagcctgtttctgacctgctggggcgataatgtcattgtgctgttttcgcttaattcggatatgctccgtctgctggcgggttcgccttttgtatttaagtctttaattgattccaaaataaacaaaaactcttctttctccatcaatgtcagccgtttttcttttttcttagctgttttcgctttctggctgtttttgatatacagcgggacatcatcgggataaatcgtgctgccggatgctgccgcggccatatagtacgccgcattttgaagttctctgatgttgccgttaaaggtgtgccgctcaaacagcggataaacggacggatcgatatgaacatgctgccccgtggctgtcagcatatgctgcagaagaagcggtatatcgctttttcgttcagataaagcagggagcggaaggcataacacgtgaagcctgtaaaataaatcttggctgaacgtattttctgcgccggtatcaccaagatccgccgtgctgcttgcaatgatgcgggcggaaagcccggcatccagctcggaaagaaggcgggcctgtaccgagagcggcatgtctccgatttcatataagaataatgttccgcggcgggccctgtttaatgcgccttcagcgccgaacagttcatattcgagccgctcttcgctttggctgcagtgaacggtaataaatagttcgctgtttctgcgggatttatggtggatcgctctggccatttgtttttttccggttccgacttcacccgttatgaagactggcaaatcagataaagcaaattgcgaggccaatcgtttcgcttctgaaaaggtgtgatgttcgccggctagctgataaaaaggatcagtttgttcaattacactcatgaattggctccttttggttctaattggtttaagtataacacgtttgtgcgatcgaaaatatctttttctcttgtatcggttcatttaattttatttacaaaattaaaataattgtcttattatttgaatattcatgttataatggcatattaaatagggatttaaataagaaaggactctgtaaatgaaaccgttgcttaaagaagactctctcatccaggtaaaagacattttaaaagcgcaccaaaatgtaaaggacgttgtgatacatacgcctttgcagaggaatgacagactttctgagaggtatggctgcaacatctatttgaaaagggaagacctgcaggtggtcagatcatttaagctcagaggggcttataataaaatgaggcagctctcaaaagagcagactgaaaacggaattgtatgcgcaagtgcgggaaaccatgcgcagggggttgcgttttcatgcaaacacctcggcattcacggcaagatttttatgccgtcaaccacaccgagacagaaagtatcccaagtggaattgttcggaaaagaatttgttgaaatcatattgacgggtgacactttcgatgatgcgtataagagttctgcggaatgctgtgaaaaagaaaaccgtacgtttattcatccgtttgacgatcccgatgtcatggccggacagggaacggctgccatcgaaattttaaatgacattgacgttgaaccgcattttctatttgcaagcgtagggggaggaggactcctgtccgggctcggcacgtacatgaaaaacatatcgccggatacaaaaatcatagcggtagagccgaagggcgcagcctcctattttgaatcgaaaaaagccggacaagtggttgaacttgagaaaattgataaatttgtcgatggggcggccgtaaaaaaaatcggcgccgaaacctttcaaacgctcgaaaccgtcgtcgatgacgttgtgcttgtcccggaaggaaaagtatgcagcacgattctcgaattatataatcaatgcgccatcgtagcggagccggcgggggcattgtccgtgtcagcacttgatctgtacaaggaagagattaaagggaaaaacgtcatctgcatggtcagcggagggaataacgacatcggcagaatgcaggagatgaaggaacgctccatgatttatgaggggctgcagcattattttatcgttaatttcccgcaaagggcgggagcgcttcgcgaatacctagatgaagtgcttgggcctgatgatgacatcacccggtttgaatacacgaaaaaaaataacaaaagcagcggccccgcattggtcggcattgagcttaagcatcgggaagattacggcgcgctcattgcccggatgaatcaaaaaggatttcattacgtagaggtgaataaagatcaggatctgttccacctgttaatctgactttttttagaacggccgcgcaaaatgacagacacgctttctcagattgtatataataaaaagaaaacaatcgaaaaagaaggattgatatcttgttactcaaaagcctagagttcaaacgacaggacgggattcaggtaaaagtgacagaaataccggttgtcacggaaggtgaacattatttttttcaaattcatcagcaccttgagctttatttgagagaggtttttgcttcacaaagtgtgagaacagtgtattcattccgacaatatgtcaagcgccgtatgaagtggaaagattacgaggccgttttcaaccaagagattttaaaacataacgcataacggtgcatattccttagcgccttccttttgataagggagggtgcgggaatttttttatgatgaatgctgtaagcgttttatccatggggggaatggaaatgaaaaaaatgaaaatcttcgctgccgtcttttgtttgctgctcttgtgcgcctgcggggggaaaacgataaaagacccgctgaactatcagattgaaccgttttcatatcaaaaccaagatggaaaaacagtgtcactgaaaagcctgaaggggcatgtctggattgccgactttatgtttacaaattgtaatacggtctgtccgccgatgacggcccacatgaccgaactgcaaaaaaaactgaaggctgagaatctggacgtgcggattgtgtcgttcagtgtagatcctgaaaaggatacgccgaaacagctgaaagcatttgcttccaaatatccgctttcgcttcgcaactgggattttctgaccggttacagccaaaaggacattgaagattttgcgctgaacagctttaaatcaatcgtcaaaaagccggagggagaggatcaggtcatacataaaacctctttttatttagtcggacctgacgggaaggtgcttaaagattatgacggcgtgcagaaagttccgtatgatgacatcctctcagatgtcagagcggctgaggagctcaagtaaactggcagattagacattttcaaatctgaaaaaacatgttacactttccactagtagacggggaaggagcaaccagattgaagctgcgaatgttctcattgatcgccggactggccttgcttttatcagcttgttctgtccagcgcaccggttctgacgctgaagaaccgaaaacgaaagatcatattgtcatagctgcggtcggtgattcattgactgaaggagtaggagatcctgacggttcaggatacgtcggcagggcagcggagtctcttaagaaaaagggacacgtgaaaacggtagatattaaaaattatgcggtgcagggtgacaaaacgtcggacctgctggaaaagcttgataataaaaaagttcagaaatcattaaagagcgccgactatatcttttttaccatcggcggcaatgacttaatgaaggtgctccgccagaatatgatgcagctgacggttcagccgttccaaaaggaagagaaaccttttgaaaaacgattcaaggcgatcgtttcaaaaatccgcaaatataatgaaaacgcagagctggtgtatgtcagcatgtataatccattcacgtttacgctgcctgaattaaaagaaattaatggggttgtaacggattggaacaagattgccgcaaaagagctggaaaaagatccccacgccgctgcggtgaatgttgaagacttgttcagtcaaaaaagcggcagcagacggatttcaaaggatgatgattttcatccgaacgcaaaagggtatgcactcatcgccgatcgattgtacggcatcattgaaaaacaagggttaccagcagaatagggtgaaatgatgaaaaagtggaaatcgctgttttttgttcttctcgcactcaatgtgattgtcgccgcggtaattgtgacattattggttatgccgggagagcaggcgaaaatacaagatcagacaaaaagtgagtacggctttcatatcacgagctcgaaagaatctcttgccaggtttgtgaatgcgtacttaaaagagaaggcatcgaatcagcttgactacaaagtggacatcaataacgatgtgcacgtggcaggtaaaatcaaagcattctcaacctccattaacgcggtcgtcacatttgaaccgtccgtacaggagaacggagatgtgatgttgaaagtgacgaagttttccttaggcgaattaagcctgccgatcagctttgtgctgaattatatggacagcttttatgaactcccgtcatttgtgcacgttcattccggggataaaagcatcgagatccgtctgtcggaaatgcctttagacaacggcatgtatgtaaaagcggataaaatcaatctcgacacggatgaaattgaattttcctattatcatccgaaacaataagttttcataaaaaaaacacagatcctttcagggatttgtgttttttcgtgtcagcgttttttgtccagcttgctgaacagtttgattaacgttgcgagctcttcatcagagtagcagtcaaaccgtttaaaaaagtattctgtttttttctggttgaaatgatcgacaattttctccccggcttccgtaatatggattctgataattcgcctgtcctctttagaacggatgcgggtgatccattccttttctactaaagcgtcggtcactgcggtaatatggcttgcggagacctcaagaatgggggcgaattccgttacttttttaggcccttgttcactgagaatccgcaaaatggtgaattcgttcctggacagctctttatctagaatttcattaacttcatttctgatttgtttaaacacttttcgaagcaaagcttccatatcatacatcatttgtgtccttactttcaaatcatgaacctccaatatgtagtcagcgtggcattcgtttagcttcccctgaaagcagaattatttttattctgtttatacatgctataatataataataccacgtatgaacaaaggagggcacccgtatgtcagaaaaaaaagaaatcgccacatttgcaggcggctgtttttggtgcatggtgaagccgtttgacgaacagccggggattgaaaaggtggtgtccggctatacaggaggtcatactgagaatccgacttacgaagaagtgtgcagtgaaacgaccggacacagagaagccgttcaaatcacatttcaacctgacatttatccgtacgaaaagcttgtcgagctgttttggcagcagatcgacccgactgatgcaggcggccagtttgcagaccgcggaagttcatatcgggcggcgatatattaccataatgatgaacaaaaacaaatcgctgaagcctcaaaaaaacagcttgaagaaagcggcatatttaaaaagccgatcgtgacagacattttgaaggctgagcctttttatgaagcggaaggctatcatcagcacttttataagaaaaatcctgatcactacgggcgctaccgtgtaggttccggacgtcaaggctttctggatgagcattggagggacagataagatggcttttaataaagaagaaaaaatcaaatcattaaaccgcatgcaatatgaagtcacacaaaataacggaacggagccgccgtttcaaaatgaattctgggatcacaaagaagaggggctgtatgttgatatcgtatcgggaaagcccttgtttacttctctggataaattcgattctcattgcggctggcccagttttacaaaaccgattgaggaagaagaggttgacgaaaaactggacacaagccacgggatgatccggacggaagtgagaagcaaaacagctgattcccacttaggccacgtatttaatgacggtccggggccaagcgggctccgttattgcattaactctgcggcactccggtttattccgaaagacaagctgaaggaagagggctatgaagcctgcctgcatttatttgaaaaatagagctcagcaatgaggcctgcctatcagacaggccttttttctatgtttttttttcttcatgtaatcgttcaataatctttacgattgtgtcttttgtgatgagcggcgcctgatcggattgatatctggggagattgaccttccgaaattccggatgtttggcggggtcgggcaatatcgcgtaaaggttgccccattcatataaagattccgtctcatgaggagaggtcagttcttcatgaagcttctcaccagggcgttttcctacttcaacagcggcggggcgaggcagtccgtgccggaacgcatattcttcaaatccgtgaagcagttcttcaagcctcagggactccattttaaaaataaatgtttctccgccctttgtaattgccgcagattgcagggtgagcgttgcggcatcatcaatcgacataaaaaacctcgtcatgtttttatccgtaatggtgagcggaccgcctgccatcaactgctcaaataaaataggaataacggaaccgcgtgaaccgagcacattgccgaagcggaccgaacaaaacaccgtaccgcggttttgaacatgatgattcgcctgatgaaacagcttttcggacaacagcttcgtagctcccattgtgtttaccggggaaacggctttatcggttttttaagatgtttactgtattttgagggactatcagtgacggtgaggtcgataacgaaaaattaaaccttaggataggggtaatttcaaactgagccggaatcggcccttttcttttttgtgtcatcgtaacgataacttctttgaagaccattcttaatagcgcgttctttttctctgtgcttgattcaatgtgatattgatcaattatcctatttatgttgtttctgactgtattactgtctatttctgattgcgcttcttgagttccattgagctcatgcttggcaatctggagttctttaaattcttcatctaaaacagcttttcttttcaaaaaaagttcatcagtgtaaatgccgctctcatatttctcgaagataaaattctctttgttttttaactcttgttctttttgtgaaagatgttcagacatttgcttttttgttttcacattactatttacgtcttcgtatttagaaatcattgaaatgatatgttttgttaaagtcttattatctaagttgcttaaagaagagaggtaatccaaaatggcattttcaacatcgttatatctcacataagtgcatttattctttttgcaagtgagtgatttaacgtgatatacactttccgtgccgtttttgttttctcgcgttcgcctagtttcgtatttagataatggttcaccgcacttagaacaagtgcatacgcctgccaattcacttaattccaatgcgtttttattaggcagcagggggactttgtttgcaattttctcttgtgattgttgaaattgttcttgatctattataggggcatgtgcatccgatactacaatttgttccttttcaggtctaattgttcgtttaccgtcttttgttttttctctaaccttatatttaacagttccgatatacgcttcgttttgcagaattgctttaattgtgtattgattccagcgcttttttcctgatggagtcggtatttgtaattttgttaagtgagaagcaatcgctgtataactataatcttttccattcaacccatttaaaaagaggttaaagatgagttgaacgacttttgctttttcttcgactgggactagtttggatgtttttttgtttaaccggtatccataaggcgctagtccggaaatccatttcccttgtgccgcatatgtgtatttagcgcctgtcatacgctctctggtcatttcaaattcttctctggccataaacaattcaaaacgaatctgacgcatgtctgcagggtttcgagggtcataaactttatatggtgtaatgataatcaatcgcttgctttgaagaaggttaacaatttgtcccgcatcactgtagctccctcggctgagtcttgttatttctttaacagcaattgcctggtacttgccttcctcgaggtctttaagacattctttaaaaacagggcggccctcaatgctttccccagacccgatttccatttttaattcataggggatttcaatcgacttcagtattttattcatgagttctttttgttctgttagcgtatcttcgcctgttcttttttctcgctccatatcctgacgagagcgtctaagataacccaaaatatttgtaatgttgtaagaatgaacgatgttttttaattccaaaaaaacagcacctcctctttattgtatttactgtaaaaacagtagtattcgtacaatattctgtctgacattgaacacgaaaataacctaataaatattgtaggggctgtattctttaagtgttgggctaaagagctcgctcatacgctctatgttttttgttagcctgagaaaatacccaaataaaaaaagaagcctcagaggacttcaaaataattaattcttctcacatgcaaagttgtcattatcccgatccattttagatgtataagcagggtgagtgcttgatacaccatgcggatatttctttctcagctctgtgcagtttgcaaagtgttctgttcctccaacagaaggggaggcttgtgcagagttagaagagctgcttgatgctgaaccgcttgagttcgatttatgtgtctcggattggtgtgttgtaactgacttttgagccggcttagatacacttactgatttcttcggtttcgttacgcagccattaaatcctttatcagtcgcatatccattcttactccaaatcttcaagtctttatctttcgcagcttgctcatctttcttatacgtgtttaaatacttcgtgtttggctcatatacataagctactcgtgctaatccttctttaagcagtgtttcttgtactgatttgccatctgcataaacgtaagccagcattctgccatacttgtctgtacgatctcctttatcaaactccagttgaagttttcccttgttaaccagctgtttgtttcttgctgaagcatcctcaccatatggttgtacgcaagagtttgggttcttagttttaggcgtgtcaacaagtaaataacgaacagttttgacttcgcctttatagttaactttaatcgtatccccatcaactgttctgttaagtgttacatcgaccagctttttctttttgtcagacgcctttttatccgacgaatccttctttgaagcattttcggctttttcatttttgtcattagtacttttgtcatttgattgagtgtctgcctttgtctcttttgcatccttttcttcttgctctgttgttttagcttgatctgaatctgttttatctgtagaagcagaatcagatccacacgcagccaaagaaaagcttagagataatgcgccaatacctaacagccatttcttcaatgtaattcccccaatttgtttgttctgtctctatatcggacaaaccttcctaattataagtataaaaccaaagattgtaaatttcattttggcattttaagacactcaaatacagttgtgtggtaaaatttagtgactcaaacaccttagaggagggaaatttaattggaagaaggaaagttaattcgcatgactcttgatgggataaaggaagctgtttctaaatacggaacttttcctatgctccaacatggagggcatgtcatggaagatgctgcttttcaattcagagacccagccagtcctcaagaaattaatagtttagaaaagatgttaggggtaactttgcctaatgattataaagagttcctattcaatcacaatggaatggaaatgtttaatggtattgagcttcttagtacagaagggataattgaatttaatgaagttcaagacttccctaagggatatgtcctaattgggtatcattatgatggcaggtatgttattgatgtaaacaaatcaaataaagggttggggtatatgttgcatctggattcaattgataatattgaagatgcggtatatttagactctaactttgagatatggtttgacatgttggtgtcatcaaacggaactaagtactgggaagtaaagccaaaaattaaagagtattataaatatgtttcagaatagatagtttagataagatcaagtggaaaggagccgtaaatgaaagtatttgaagtagcctcgttcatttcagccgcagaaaagcgggcaaaacaatacgatcagattagagaacaatttatcaatctcagaaaagcatttcagggaatggctgatttagatgacagtgagttttcaggcaaaggcgccgacaacattaaagcattctttcaagatcacgccggtgtcacagacagctggcttgatctgatcgatatgaagattgcgtttcttaacagtatttctggaaaagtatctgatgccggattggccgattcgtttgtggaagagtcatttttagaacacgagctgattcatgcgaagaataaatcacaagccatcatgcaggagcagcgcaatgaactcaaggacatcataaatgaaatcagcgatatcattcatcttgatgttttctctacagaagatgtcgatcaaaatctggaatcagcagacaaaaaacgggacgataccgtaaataggctcggcaagcttgatcacgatctaacaaaagaatacgccgaaacagaagcgaacgaacagttcatccaggccgactttcagcagctccaaaatgccacgggcaaaggaaaaaacgccactccgcttcactataacgccaaggcgtacagggaaagtgacatacataagaaaaaaggcgagattgcaagacattcagacacatatttaacgtttaagaaggaagaagcaaaagagcggaaaatcaaggatctgaagaaaaagctcgctgacggtgtgaccgatccggatgaatacttggaaattgcgaagaagatcggctatgaaaaccttgaaccttcccagcagcaatatgtcattcagcttgaacaagcaaaacagcttgaagaagccggagaagtgacttgggatattttaaaaggagccggcgttggtttatatgatgtcgggaaagacacggttagcgggttatgggacttcataaccgatccgggagaaaccttgtcagcactggggaatgcagtacttcatccagtaaaaacatatgatgctgtttcagcagcaattgaggaatcatatcaaaaagatatggtgaacggagatgcttactccagatcaagatgggtgacatatgcgataggtacagtagttacctctgtggtaggcacaaagggagccggttctcttacaaaagctgacgtagcaggaaaagtcacctctaaagtcaataaagcaggccaaaaactgaaagatgtctcaattgctgatttattgccttataatccccgttacgatgttgttccggctggaggagttccttataatgtagttaacagtgaaaatttaaaggatcggttacttagattaattgaatcagcaaatcctagaacggtattaccaaggaataaaggtcgatgggaaggcgcacctggtgacggaaaatggtattccgacatacctgaagtaaaagcagcgactaagggagaaccgattacttttaaaaatggacgtcctgattttactccatggactgttgcaaacattaagtttaagtctggtgaattaaatggaacgaaaaaagattttaggcttgtttataaaaaaattaaagagatcaaggttttaaatctcaagcgcaggcgaaaaaatggctgtcacaacagggacttaccccacaccatttggatagtgtcacaatacaactagtgcctagtgtgattaataacaaaatacctcatattggaggagcttctgatttaaggggagggtattagaatgagtttcaataaaattgaacaaaagttaaaagaatttacgatagatactgaaacagaatccaacattaatacaaacgagcagctcaaagaaattgaaagaaatataggtaatcaattgccttccgactataaggattttttgaagggatatggaggctgttatttagaaagtaaaaaaacaacagatgaagttgagtacgacgtttgctataaacctatagagaaagatccttggatgggtaaggaagatgatacacaattactagagagcttctatggtttagctaacgatcataacagtctccaagaagcaatcaatacttattctgatcgctttcctaggaatattattcctatagcaagctcggcaggtggtaatgaaatatgtatggacatcgacaatgaaaaagttttgttttgggatcacgaattaagtcagcctgataaagactttttcctaattgccaattcgtttgaggagtttatcctaagtttagtagacgaaccaattgaaacggatgatagtgacagtgatgtggaaattgagattttagacaatgactttggaaaattgctctttggtaaggacaattagcttttatttttaggaaaagtattgcaaagttaagctctcagaaagagagcttttttattttcgatagaaactaattataaaaagggagagaggttatggattcgtaccaaataaagaaattaaaacccgaagaatacaataagtgtaataatatttgggacatggaaaagaaaatggctaaggtgttttatgacgaattagtaagcggcaacagaattacttttatttactcagtgaatgacgagtttataggagaaggattgttagtttttcaaaacaatgacccggattataccattccggataaacgcatttatctatctcgtatgattgttaaagaaggatatcgaaatcgtgggataggtggcattattgttgattatttgattgattatgctaaacaactaggatatgagtttgacaggtggtcacaaatcataaaataaaaagcccactcatatgagtagggctaaattaattaattttttaacctccgactggcctttcagctatctggatgttagatggtgaatctgtactcaattgcgttaaagctaccccacttaaaattacagttaaaatagatacgcaaagcacaatttttttcataagattccctccacctgattcattttctgttcagcccaaattttttcattgaaaaagcttgttgcttcttcaaaagcacctattgattcaaacctttttgcagctatgtaggacaattcatctacactttcaaggtcattttgttgttttaaaaactcaatataacggatgcaattattgaagttgttttttaattcaccgcaatataggttgaataggatgctaattttggcttcgtatatcttattctccattaatatgagtctttcctgtgctttattgtaaaaattaatggctttcattttttcgtcaattttaaatagttccttaatcatcatgaataaagaatttatataataatttgaattcatccaagattcattttcaatagctttttcgagagatttaatgcacttatcaggtttgtcccaatcagaatacacgatactaagattgtgatataactgagcttccaaatattcatcctgtgtttcttgtgcaatgtctattgcttctaaataatatgtttctgactcttcaaaccgtttcatatcggaatagtttgcagccgcaatcattgttgaagttgccagtttgcatttatagtcagggtgtcgcttatatattgcaattgcattcttgatatagtgttgtgccacaatgctttgtttaacaagagtgtataagtaggagaccttggagtagaattcagctgcttcaatttcatccggaatttctgcaagctttttctccgctaatccatataagttaattgctcgatcataatttttgttgtatgcctcgtacattgcttcgaataaataaaagttatattccaatttatcgttcgttctttttatgaaattttcattctcttcagtgaaataagtgtgcttttgtaaaggctctccgcgtgaagagtgtagcaacattttgtgtctttcttctaataaactgtaatatgcaagaacttcttgatcctcttccatatcatcgaacaggcttttaatctctgagtaatattttattgactcatgtaccttttgtttctttatagcaatgtaccaatcattcagtgtagtagcaacaacttctgaagcgatcttgctcatccaaacccctctttctgaaaatttcaaaaatcctttggggataatcataacatagtcattgaaaaagttgtaaaaggatgtagagattttgggattttctaatttgaaaaaacgaaaaaaataccctcctcgttagagaagggtacgtgatcagtttgctgttgcttttagtgaggcaagccattcacctaatgttcctgagaaaacttgttgaacggctaattcatatgctgattttccatctttaccggcagcgccagtagctccagtactgcctttttcaccttttaatgaagctaaccattcaaaagtgatgaatattcaaggcgggagtaaggaaaattaacaaaaaaatgtgagggaatgtagataaaacgatttatcttggttataccgttattggctgctgttattgcctctccaactcaaatgaaagcaagtccaatgccttgtagtgcagtactcgaaccggtaaatcaaaaactgaaaaatgcgaagggtgcggcactaatctataaagtgcagttatacccgccaagtgctgcaagaacgaatatgagtattcttgctgtccaccttcctcaaccatcttcttatggaagctacgacggttatgaaggatttgcctccaaaacaggagaggtcagttggcgatttaaactatatccgactcccgaggaagagagccctaattgggctggaagggttgattccatatcagctgaaatgacaaatgttaaagtgcaagtgcgcctttcaaattctaagacgcaaaagttggggccaagtgtattaacaaacaatattcaatcttgctattagaaatgtagagttcttatcaaagagagcaatgcgactggatcttttgtaaattgtcaaaaaggtaattgatcgagaaattctggtgaaaaatgaagaagagtccattaagatggaatgtctggagtcaattcatcatttgatagaagagagccggcaaaaatcgatattgcgtttgattttgtacatagaaagacggcataaaaagaaatggttagctaaaaaaaggcaaagagtcaacgctctttaccatcaggtgttttccttaagcggtctgcaatatgcttaattaaattcagcgcagcagtcactaatccaataactaaaacaatttcaagtaagaggataaatccaaaatttaaaccgcgactttcaaagtaatcatcggtaaaaaagagcaattgataaattccaagcattagcacaataaaggaagtgcctataatcgccagagactttttagagaactccttagtatggttgaaattataaaccaataagaacaaaaatagacaagccatggcgatcttatgagtcaatgaatcacttgctgagaacccttgcacaagtaaggagataattaatccggtcattccgattattttgttcaatatatcacctgctttgtataagtatgaccttagatgtcagcttaccaattaaaggtgatattctcaacataatgcagtttaaacttaacttaaaatcgtaattttaagaacaaatttagagtggatcatgacatgctgtttattatgctgtaaacaaacgcaacaataaataatggataagagataatagcaattagttttgaagatttgttctttttttcaaatgtgtatattagtgcaaatcctaaaaagaatattgtgacaaaccaagaagaataggacgggtacaatgcaataagtaagacaataagagtggataacgcaaaagaagagtttagcgttattttctgatcgtttttcaaataaaccgcctccttacacatattccccccatataaaaacacttaaacattatattaagtcagcatgattaaatgataaacattttaagtaaagaacaagataaagcaatccggcatttcaagacaagctgaacatgtctgaaaaactgtacatatccttagttaatgtaaactgcttatagataagcaaaatgattaagcggaaaggctgtatagacttataggaccttatataaacattagatcgcttaaagaaggtgatgtggttgatcagccaattgaatatttcatgatgcaattgtgcggttctataatggtgaagacctcgccgtgttccatttgtctagggggggaatttgtttaaattcataaacatgaggcgttttagtctgtcatttcctaaaacagtgttttattcttgttacaaatatgcaagaagggcggtttgaacttgtatagagtgtttataatgctgttaattttgttatgtataacattagggtgtcaaaaccaacataacaaacattttatggaagctgagcaaaccatggtcggctatgtcatttttaaaggagagaatcaagcaattctcacacctaatgaaaaagctgatgttaaagactatgaaaatcttagtgaaaaagagattattgaaaagtatagatcggatatagttttactgggacttagtcaacttaacaataaagatgacttgagcaaagggcaaaaaattcgtatttggtataaaaaattaaatgaatcttcaccgccaaaaacaaacatctcaaagtttgaaaggatttagtacatattctgtaattcctaggaataccgctgaaaaaactgaagcggcatattgaacagaaataatgtcttcaaaccttacctcattcgcggtggcttaatcctgccccaagatttatttgacgattgttgactcaggtgcagagaaggcacatgccaagaacacatttttgaattactgggcaccttgaataaaaccagcattcccgtattcatatgcgaagagatctgtctgaacgctggataagttaaccatacatttgaacaagcttgcgaggctttgataaagaaagaacagtcaagagacgaaccattacatacatataatactcctgtgaaagcgggggtgtagttttggaaccttaccaacgttatgaggaattaaagaagaaaacaataaaggttgtccataaagataattacagtatccgctatatagatcaggatgaagcgagtaatgacttagatgaattttataaacaatttgctcagcatttattggaggctgctttggaaaggagtgcagagtaagcttctttttttgatttgtttgtagtaagtatcttaataaacggctttatcggtactgatattaatcacatgcgtcacctcttgcagcaaagcggcttctgcgacattttgtccgccgataaggttggtttgaatggcttcaaagggattatcctcacatgtcggaacctgcttcagcgcagctgtgtgaaagacaatatcaacacctttcatcacttggttgactcttctgtagtcacgaacatcgccgagcacaaatgacagtctttgttcatccgcgtatttttgtttcatcacatattgtttgctgtcatctttgctgaacacaatgacttctttaggggttaagagcaaaaggcgttttactatttggcttccgattgatcctgtcccgcctgtgacgagaacagttttatcgtgaaaaaacggttgtagctctactgcttgctgtttaggcatggcttatcctccaactctcgtttctctaccatgcatcatatgttgaacaatttcagcgagttaatgaaagaaaccaataaatcaaaaattagagaaaaacattaatctgatgcgctttcatatcgctttacccgattaatagaatagaaatcacaaataaaacattgtactaaatgttcattctaaatatttgctcatgtcaattctttctcttcataaattctcacatgcggacaatcttcacaaaaacttaacactgaacttcctgtatgtattttacaattaaagtacactttcataaaaggaggaaggaaaatgaatcattcaaaaacacttttgttaaccgcggcagccggattgatgctcacatgcggtgcggtttcttcccaggccaagcataagctgtctgatccttatcattttaccgtgaatgcggcggcggaaacggagccggttgatacagcaggtgatgcagctgatgatcctgcgatttggctggatcccaagaatcctcagaacagcaaattgatcacaaccaataaaaaatcaggcttagtcgtgtacagcctagagggaaagatgcttcattcctatcctaccgggaagctgaacaatgttgatatccgctatgattttccgttgaacggaaaaaaagttgatattgcggcggcatccaatcggtctgaaggaaagaataccattgagatttacgccatcgacggaaaaaacggcacattacaaagcattacggatccagaccgcccgattgcatcagcaattgatgaagtatacggtttcagcttgtaccacagtcaaaaaacaggaaaatattacgcgatggtgacagggaaagaaggcgaatttgaacaatacgaattaaatgctgataaaaatggatacatatccggcaaaaaggtaagggcgtttaaaatgaattctcagacagaagggatggcagcagacgacgaatacggcagtctttatatcgcagaagaagatgaggccatctggaagttcagcgctgagccggacggcggcagtaacggaacggttatcgatcgtgccgacggcaggcatttaacccctgatattgaaggactgacgatttactacgctgctgacgggaaaggttatttgcttgcatcaagccagggtaacagcagctacgcgatttatgaaagacagggacagaacaaatatgttgcggactttcagataacagacgggcctgagacagacggcacaagcgatacagacggaattgacgttctgggtttcgggctgggacctgaatatccgttcggcctttttgtcgcacaggacggagaaaatatagatcacggccaaaaggccaatcaaaattttaaaatggtgccatgggaaagaatcgctgataaaatcggctttcacccgcaggtcaataaacaggttgacccgagaaaactgactgacagaagcggaaaataaacatgaaaaaagcagcttatccaagctgctttttgatgtgaagagcgtttcatgagaaagtcttggaacggatagccgcaagcacagccggaatctggtcatacgtgtacgccgggactgtctcttgataattaagcgccgcggtttgtttacgttcacccgggtttgtcatataaaaatggatcttatccgcaaaatccgcaagcccgctgtaagaaacaaaggatgaaaacgggggcgcgggagaaaggtctgtcagctgaaaggcctgacaagccgcaatgtctaagcttctcgtatttaaactgatattttcgatgccgcgtccgttctgattgagcgcaaaccgataagaacggtgagggtttaagaccacgtctgcgctgttgtaatataatgcggcacgttcgggtgcaatccattcatccattacgagcacattttgctgcctggcgatttttttaggcagatgtctgcgccatcccttcccgatgatacgaagcgtatacggaagcttcgccgctgctttcaccagttcaacgcggttcgggtacgggtatccgatcagaagcagatttgtgtgaagagaagcttcagcaggttgtttcttaaaaagccgctgattaacggggatcgggacataatatacgtgctgtaagcccatttgccggtaagcatcaagcgcgttttgttctatcgttaaaacggcatcggcgaaaggggcgattgtcatgctcacatcgaaataaaaaggatcctccgtcatccatagataaacgggaatctgttctgtcttcagccattgaagccattcagacggaatacggtctcccgtcatcatcagactgatgtctggtttgaatgcccgtatactgcggatggtatcttcctcaaactcagaaacagaaaaaaagcggacggaagactgtaaaaagccttcctcaatccagcggtcaaaatacgtgtatatgcctttatatcctgaacggatatataaaacgttcatatgctgttacgaagtgaacgtgacactttcaactttgtcgacgtcaagcaatgttgtagcagagcctgccggtgtaacggaattttcctgcgtaacaaaaacgattccgtgaatttcgtcaaaggcaacaaattgaaccgggccgatcatgtctcctgaatccatcacaatgctgatgacagtgccgggctgaattcttgcaaaaatccatctcgcagctaatgaaataccgcttcccaatacagattgtgcgctgagactgtctttcgccgctgcttcatctacttttgcatcaattgccgattccaataattcttttactttgttttccacattatctcctccatctgtaccgccagataaagcgctgttgtcaaatacaggggctaaaagagttttcaataactcctttttaagctccaaacgatcctcgctcatgcggacatacacctcctttaacaatttcaacctcacgtttattcatattcctgattgaagagattggtataagtcgaatgccgttttgcttgtgtttttttcaatatttaatcaaacagctgaattttcgaatcaggctttgtttgcctatgcggtttgtaagagtatgacatacgttgtatagattaaaaaatgaaggagaggaatattttggattcggaagaaactgtaaaacacgggggttttgaggaggaatttcagctcgtactgcttcttcttcttttgttatcccgtcagccgtccggagatcattcagatttgcggcgtcagcttgtaatggcaaaagagcttggggttcctgtatcacgcgtcaatctgattaacggcagcacactgcaaaacgtaattgtcaaagaagtgctgtcagatttggccgtttttcaaaatccgctcaatcatacgagatcaaacgtcgcgatttcaagcatcgtcagctggggtgctttttaataacggatatcaggctctgtctctttcggagccgttttttatgtttttacagaaggggtgatgggatggaaaagaagatctcaattatcttaacgagttacaacaaaccggatcttgtgaaacaggcgattgaaagtgttttgcatcagacctacagcaattgggagctgtttgtaatggatgatcattcaaatgaagaaacctcggctgccatcagtacgtatataaaagatcctcgcatatattatgacaacagttttatcaatcctgccgaacggctgaagtccacccggtatgccgttttgattaatgatgcgctttcacgggctaaaggtgaatacatcacttatttgacagacgacaccgtatttcatccggataggctcagccgcatggcggaagcgcttaatcaatacagcgagtttgatgccgtctattccagccagaaggtgatacatgtaaacgggcgcggaacagaacaattccacttctatcgttatgctgaagaggtgctagatcaggccgcttttctcgttgatcactgttcagtgatgcaccggagatcattgcttgagcgtgtgaaagagaagttcggcagcttttgggacgaagatgttatgcattggaatcacggagactctgttttttggagcaggctcaacacatttacatcatttctgccgataaaagaagtgttggatacgacctataaaacaccccactcatttcagaacacgtatcaatcgcttccgtctgtcctgatcgacggatcctttgtaaaggggacggatcagaaagtatatcagcttgaccgaaataaaaggaagcctgtaaacgagcgctggcatacgttatatgaaggccgaaccgtcgtcattccggatccgtttttatttcaatatgaggaagagaactccgtcagtattccgaattttcagctcgtcagggatcagtttcatgtttattttatagaagacggggagaaaagaatggttgatcatagcgcatttcgcttttaccgatttaaacggcatgacatcccggctttagagcggggcgaaatacaatcgcttccggacggtccgccgatcagccgggggacatcgggctgtattcaacatctgcccgggagaatgctgtttcgcattgaacgggaattttatgtttatttgagaggggttctccatccgatcagtcatgacgtagcgaaacgcttttttgcgaatcagaaggcgatacccatttcctttcagcaaattaaacaattaccaattggaatgccgttctatccggtgtacgatgaaattatgagaaatctcaatataacaaaaggttgagagatgcagttggatgtgtaaggaaaaggagagcttttatgaccgatcaatttgataaaaccgagaagcagtatatagagcttacttccggcattcagaggttcgagcatttcagtgtatatacggacccttttttgccgcagattttttcgcataactttgttcagctgcaccgtacatttccgttagacaaactgctgccgtttttttcgtccgttccgggcttgcttcaagccaattatattcatgtgaaagcggctccggagcacgcgtttccgcttcttctgaaacaaaatctcgtaaagcagggctgcgtagtggaagatgagctgttttttgcaaggaaactggaaaatagggacctgcaggccggacacccgctcactgcttgggggacggaaaaaagcctcgccgacgggtcgtctattatgaacatctatgatgccctttacattggcgaggcggcggccgaacaaaagcttgagcggaaatatcctttgtataaggacggaacggttatgcttgtcgtgtgctacagcgacgcctcgcaaacgattccgatcggctgcggagagcttttcatcaacaaagcagataaaaccgcaaaaatagaagaagtcgcaattctggatcaattccaacgaaaaggctacggatcgatattgatgaatgagctgatggcggcggcaaagctgaacggcatggaaaccgtataccttgtgacgtccgggatggacggtgtaaaccgcttttatgaaaaactcggcttcaaaagatttcggcgcgtgcatacaatttttcattattttcttacatagttgggcattcgcataaaccaattgggagttggcccgcatacaatgccgtatatcgtaagaagaaaggatgatttgcgtatgtacggatacggatatggctacggttgcggcagttttggctatggttacgggcacggcggctgcggaggcggaaccagcacttttgtgctgatcgtggtattgtttattttattaatcatcgtcggtgcggcttttatttgttagactgaaaaaaatcctataatgaaaatcagcctgcagagaacatcactttctgcaggctttttgttatttccatgctgaaaaatcagcttgaaaaacattttaatacatactacctttctggagaagggggcgaaaatgtgaacataacgattgaagaattacctgaatccagaattgcttatttccgaaacatcggagagtatggcggaaagcaaaacaatgaactgatggagtcatttaaaaactgggcgcaattgaatggtctgcttgatcattctgtcattttaggaattccgcaagatcatccgaatcgtactcctaaagagaaatgccgctatgatgtttgtcttgttatcaatcaagaccatgtgcctgaaccagcccggatcggtacattttccggagggaagtacgctgttttcttgcttgatcatacaaaagaggcagtcagtggattttggaacactattttttctgagatcgaaaaaaataatttatcaatcagagagcagcccattatcgaaaggtatactttccaaaaggtgaatcatcatttgtgtgaaatattgattcccatacagtaaagaagacgggaattttccgccatctgcttatactgattcagatcaaaaatgatgtgataatgagctgagcaaagaataaaatcaacaataggaatagaatttccagaacgcttttcaggctgtcgggacatctccggcagcctgttttacagaaaggtattttctgcaaaaaactttctgaaggataagaatgcggttattcatctgttcatacaatgaagcaaatgggttttcgaggtggaaagatatggggagctatttaatcaaaccggagcttgacgggaattatccgtcagtcagtcatggaaagggatcatatgtgtatgatcaggaggggaacaagtatcttgacggagcatcgggggcggtcacttgcaatatcggccacggcacggaggatattatacaagctttaaaagagcagcttgactctgtttcgtttgtgtatcgctcgcaattcaccagtactccggcagaagaactggctttatttctggcggatcatctgccgggcgggctgaattggtcattttttgtaaacagcggctcagaggcagtcgaaacagcgatgaaaatggccgttcaatattggcaggaaaaagggcaataccaaaaatccgtctttctatcaagatggggcagttaccacggcattactttgggagcgctttcattatcggggttctacgaacggagataccgcttcacccagttgctcgaacggtttcctgccgtttcagcgcctaatatgtatcgttcagagctgcagggagaggaatttgtgaaagctgcggcggctgaactggaaacggctgttcagcggatcggttcctcatttatcgcgggatttgtcgcagaaccgattgtcggagcagccggggcggccatcactccgccggcaggttattatgaagcgcttgaggatgtctgccgccggcacggtattttgtttatcgcggatgaagtcatgacggggctcgggagaacaggacggatgcttgcttctgagcattgggggatcgcacctgatatcgcggtgctcggaaaagggttaggcgccggttacgctccgatagcggcagccgttgcgtctgatgacatcattgaaacgatcaagcggggctccggggtcattatgagcggacatacgtacagtgccaacccatactgtgctagagcggcgcttgaagtgcttcgctatgttaagaaacacgatctgcttcggcagtcagaggagaaaggcgtaatgctgaagcggaaattagaagaaatcaaagagcgcagcggggtgattggggatgtccgcggtaaaggcctcctgatcggggttgaattcgttaaggataaaacgacgaaggacgttttttcgaaaaaacaggccttcaccgaaaaaatcattaaagcggcaaaaaaacggggcctgcttatttaccctgcaaagcccggtattgacagcggagaaggagacgccgtcatcatcgccccgccgttcacgatttcatatgccgagctggatgagctgtcagatctattttcacaggccgcagaagaagttgaaaaaatgatgaagaaggattgagctgatatgtctatttttcataaaaaaatcgatattcatgaagcaattgccgatgtcaaggacgaatctgtcatcatgttcggcggttttgggggagtgggttcacctccgtcattaatcgaagcgattttggaaagcggcgttaaagagctgaccgtcatctgcaatgatgccggatttccggaaattggcatcggcccgcttatcgttcataagcgggtaaaaaggctgatcgcttcccatatcggctcaaatcctgtcgcgggcagacaaatgactgacggagcgcttgaggtggaattttcgccgcaagggacgcttgctgaacggattcgtgcaggcggagcggggctaggcggtattttaactgatatcggcattaataacgcaaccgtttgtgaaaacaaagaaaccgtaacgattgacggaaagtcctatttagttgaaaaagcgctgacggctgatttcgcttttgtgtccgcacatactgctgatgaattcgggaatctgacgtttgacaaaacggcgcgcaacatgaaccctctgatggctgcggcggccgaaagaacatttgctgaggcggcagagattgtgcctgccggcgaacttgacagcgagcatattgtaacgccgggcgttttcgtggagggtgtcgtgcaaagtgaaggagtgaagtggaaatgggcttgggaatagcggaaagagagagtatcgcgaggcgggccgccagtgaagttacctcaggtatgattgtcaacctggggatcggcattccttctttagtgccgaactttctgcccgccggcatggaggtaatgctgcaggcggaaaacggcgtcctcgggatcggcggcagtccggagcgcggagaggaggatgagcttttatgcaatgcggccgggtttcctgtcagtacagttaagggtgcttcctattttgattcagctctgtcttttgccatgatcagaaaagggctgatagatattaccattttaggcgcgctccaagtcagcaggacaggtgatctcgccaattggctcgtgccgggaaaaaaagtgcccggaatgggcggggcgatggagcttgcccaaggcgcgaaaaaagtagttgtcgtcatgagccacaccgatcagaaaggacggccgaagctggtcgaaagctgttcattgccgcttacagcagcgggctgtgcagatctcatcattacagagaaagccgtcatcagcatagatgatggggcttttgttcttgaggaactgctgaatggcacgaccatagacgatgtcattcaaacaacggatgccgagatcagattgggagaatgttttcttaaaagggggcctgtccatggatcaattagaaaagaaagtcactgagtgggcggaagaaaacacagcaaaagcggtaagcttgctgaaacggctgatcggggaaaaaagcacgttcggccatgaatttaacgcgcaggcagtcgttttagaaaaactgagacagtttgacatggatattgatgtatgggagccgagtgtcaaacatttgaaagagcatccttatttcgtatcggaacgcgaagacttccatgaaagcccgaatatcacagctgtaaagaaaggggccgggggcggaagatcactgatactgaacggacatattgatgttgtcccggaaggaaatcccgccgcatggacgtatgaaccgtttaccgctgttgaaaaggacggcaaagtttacggccgcgggtcaacggatatgaaaggcggcaatacagctctcttgtttgcgttagaagcgcttgaagcctgcgggattacattaaaaggagatgttctgtttcaaagtgtcatagatgaagagtgcggcggcgcgggaacactggcggctgttatgaggggctacaaggctgacggggcgcttattcccgaaccgactaatttaaagctgtttgttaagcagcaagggtctatgtggttccgcattacggtaaggggattgtccgcacacggcggcacccgctatgaaggggtgagcgccattgaaaaaagcctgcatgtcatcacagcccttaaagagcttgaacacgtccgcaacgcccgtatcacagacccgctttatcgggacgttccgatcccggttcccattaatatcggcaccgtccaagggggaacgtggccatcatcggtagctgaccgtgtggtgatagaaggcaggtgcggaatagctccggatgaaacgcccgaagcagtaaaagaagagctcgcaagctggctgaaagatttggagtaccgggatgagtggtttaaacaccacccggcggaaatagaatggtttggggctcagtggcttccgaatgatctcccggatgagcatccgctgatttccgctctggaatcttcttttgagaaaatgaaaggggcaaaaccggttcgtgaagcgtccccgtggggaacggacggagggcttttgcagcacgcgggacagacgccggtcatcgtcttcgggccgggagaagtcaaagcggcgcatcaggcgaatgaatacattgaaatccgggcgttaatcgatgccgtcaaaatcatttctctttttatcatggaatggtgcggggtggcagatgggggtgacggagctgataaaggaactgagggctgaaaagggagcggccgagattgatgcagaccgtttcaatgagcggctcagagtcattcgttatgacggacagatcacggcgcttattccggccgttttggcagaagcaaagcaagaaggagcccaaaaggtaattttctttgccaagcgcggcgatgagccggaatttgtcaagcatctttttattgttgagggtgtcatagacgggtattacaacgggcatgaggctgttgtgatggtgcgctatttagcagaggaacggagacggtcagattcatatgtatcagaagattcgactgttgaccgtttatatgagacaccgcggcggggactgactcaggcagaaagcgcgctgatgttcagaaaagcggatgaagatgatgcagaccgcttatcgcacttatataaacatgtttttcttacctatccgactcctgtctttaatcccctttatattaaaaaaacaatgagagaaaacaccatctattatgccgcattcgatcaggatcgtctcattggggcggcaagcgcagatatcaatccggtattggggcacgctgaaatgaccgattgcgcggttctgtcagattacagggggaactccgtaacggcacacttgtttaaagcgttggagcaggaactcgcgggccggggaatcatccatcttttttccttggcccgtgcagcgtcttacgggatgaatgccgttttgtaccatgcgggatacggctacagaggcaggcttgtgaacaactgccgcatttcagaagggctcgaaaatatgaatatatggtgcaagactttacgtttggccattcataaggaggaattcgtttgacaaacaaatggtttcagccgaagcgtcattggaaggagattgaattgtggaaagatgtgccggaagacaagtggaatgattggctgtggcagctcacccatactgtaagaaccgtcgatgacctgaaaaaagtcattcatttgaccgaagaggaagaagaaggcgtcaggatgtctgtaaaaaccattcccctgaacattacgccttattatgcttctttaatggatcccgataacccgagatgtccgatccgcatgcagtccgtgccgctgtcagaagaaatgcacaaaacgaaatatgaccttgaagatccgctgtttgaagatgaagattcaccggttcccggtcttacgcaccgctatcccgaccgcgttctttttctggtgacaaatcaatgctcgatgtattgccgatattgcaccagaaggcgtttttccggacagatcggaatgggggtgccgaaaaaacagctcgatgcggcaatcgcttacatccgggaaacgccggaaatccgtgactgcctgatttccggcggagacgggcttttaatcaacgatcagattctggaatatattttgaaaaacctgcgtgacattccccatcttgaaattatccggatcggaacgagagcgcccgttgtatttccgcagcggataacggataacctttgtgagattttgaaaaaatatcatccggtctggctgaacactcattttaatacgagcatcgaactgacggaagaatcggttgcggcgtgtgaaaagctcgttaacgcaggtgttccggtcggtaaccaggccgttattttagcaggcattaacgattcggtgccgattatgaaaaaactcatgcatgatttagtgaaaatccgcgtgcgtccgtattatatttatcaatgtgatttgtcagagggaatcggccatttcagagcgcctgtgtcaaaagggctggaaatcattgaaggactgaggggccacacaacgggctttgccgtgccgacctttgtcgtcgacgccccgggcggaggcggtaaaatcgccctgcagccgaactacttgctctcccaaagtccggagaaagttgtgatcagaaacttcgaaggggtgattacatcttatcccgagccggaaaactatatcccgaatcaagccgacgactattttgaatctgtttttcctggaacgatggccaaacgcgagccggtcggactgagcgccattttcgcggacaaagaggtttcgttcacaccggaaaatgtatcgaggatcgacaggaggaaaacgttcacatcaaaccctgatcatgaaacgctgaaagaccgcagggaaaagagagatgaattgaaagaaaagaaatttattgcacagcaaaagaaagagcaaaaagcaggatcggaagtcggaggtgaatcgccgtgaagccatgcgagtggtgcggcaatcagaaggcgtcagcttgtcaggcggctgtgtactgggagcttcctgacggtacgagggccatagaaattacagaaacacccgcattcgcctgttcctcctgcagcatgacttatcaggaggaagcggtcatagcggaaatcgaaaatcagctttttttagtcaatgcaaaaaaattaccggaaacactcacatatcaagagctgatggagacagaacggatcttgaaacggaattattttgacttctcctagtcttcttttgttgtaatttcacacttgaattgtataatagtacaacaaaagacagtcatcaggaggggaaacccatgaaatccttttatcactatttgatgaaatacaggcatcccaagccgcaggacgcaatcagccagtttgcgaatcaggcatacgaagatcacggctttccgaaaacgtcaagcgattatcacgagctcagttcttatttagaactgagcgccgactatttagaaacgatggcgacatttgatgaagcttgggaaaaatatgagaccgaggtgcatcacgcctgacgaaaaaccgcacattgtgcggtttttttctgttgaaatcactcgcttatgaggtgccgtatgatcaaatcccgcaacgccgtccgtttgatcagctcgtaaacacatcttcctgaaggcacgtatcataaggcagtagaatgtatagctgcagagttcaccggatcaggcctgctgacggcggggtcccgggtaaggagcctcttttcacggagaaataatcaaacatttaaatgaagtgaggggaatcaaatgatccattaggtaagactgatgaggcactgacgtttggacggaataggggattttatgtgacaaggttgaagcggattgaagttgtgccttgcaaatatgcagccggaattggatctccctacaccttcgatgatgtgtttcacggcaaatcttgaacatcacggcggtgatattgtcaatatgccttcgggccgggtgtttacctttgcgtcatagagaaaaaacaaaaactcattcaaaataggcgcgttttgtctcagcactgttactgcagtcgatcgagagcgaaatgtcatcggacgcttctgttacggtaagtgaaaaaacgcacaagcatgttgcggtttttgccattttgaacaggtgcagaaatagatatttcctgtggttttcatgcccatgcgaaatgatggcggccggcatacgatagcgtatgacagtccgcggcaagggggagacagcatgaagccagataaaccgaaatttcaagtgggagacatcgtggtcgtcgtgatgtacggaaccgtcggcaccattacgaaggttcatcaaattgataaacattatctttacgaagtcaatcataatgaagtgctttattttgaatcgtccatccagctttataaagattatgagggcgtgatcgtcgatatggaaaaattggatattgaatatgaatttctgatcggcgacgtagtatatgtaaaggactacggaaaggaattattccgtgtcatcggccacagaactgaaatatggagatatttagaggatggctgggaggatattatttatgagctgactcggctgaaagacggagagtggcttgaaacggaggaagaggatctcacgctggttctgagaaaatatgaaatggatcagtttgtgcatcagctgctgtttgtccactatgttggggaagcatctcatgagatcggcgaggataccgtcgcgtctgctcttcttcagtttgaaggcgatgctgatgatcccgataccctgcatgtgctggcggtatcgattgtagatgagctgcttgatatttataacgattataagattctttatcatttgttcggtgacgaagaatataaagatatgatgaattttgtgctggaaagcctgcgggagcatttcagctagccggcaaaaaaacggacggtgacatataaaaaccagggcagacagccggcaaagattacaaacgacattcctttcagcactttttccaatacgacatcaaatccatctccgtccaataaagccatcattttcgtcatcatcttttctccctccggggcttgttttttaaaagtatatgagcggacaaaacgtttagaactttcgggtataatttgaacggttttttcataaaacataaaaaaggaggcggtgtttgcatgaaagaaatagatcttgtgattgacacagaagaaatagctgattatttttacagtcagcttgctatgcgcgggtacataccgagtgaagaggaaatcttcgaaatagccgacatcacctttgattatttattagaaaaatgtatgatagacgaagagcttgatgaagactgaaactgcggaaccgaagtgaaaaagcttcggttttttcaatcagctcgggagaatgaaacatggggggaaaacgttgtacaagccagcaagtcttttcgcattgtttattctgctcgcagcagcgatccggatagaagccgtccgggtttttgatgagcgtgtcatagaagcggctgtcaggatcagggctgcctggctgaatgaattgatgttatggataacggagctcggcacgaccgcggtgcttttgccgcttcttcttttgacaggcgcggctctgtatatgtacaaaaaaacgccggatgttgtttttttgccgcttctctttctcattgaacggattgtaaacataaaaataaaagaattgattgaaagagccagacccgcttttgaaccgctcgtccatgaaacctcatacagttttccgagcggccactccatgaattcggcagtgatgtaccccgtcatcgcttactttttgatcaagcatgttccgtttttcacgaaaagaaaacgggccgtcaccgtctttaccggggttctcgtcattctgatcggattcagcagaatttatttgggcgcgcattttccgacggatgtgcttgccggattcagtctcggactttgcctcgtttcgctttttgcgcttcttgacgaaaagtatcacccgtttcgacaaaaatagagacaggaaaaatgagaaaaaacgctaatactattaagaaataagagggagggatcttgatgctgttatcgctgcccgtgtttaaaaaaaagacttgcgcctatgatgtgacgatttttcaaacaccccgctacggcgagaaaaagggatacagggtcgtctatcggacagagctggccgctgacaatcatcaagacgcactggaaagggcattttctgtttttaatgtgcctgatacggtcccaaacgactatcaagccagattcatagcgaccggagatgtcatactcatagacgaaggaagaaaaggaaagacgtattacaggcttaaccctgcgggatggagcaaaattaaccggctgctcgtccagccgaggtaagacggggccggctgaatcttcagccggcttccgtattgtctgggaaagactgtgttaaggcttccgtttagcggcggaatgctcttttccatgcgcttcatcagctgcaatgacgtctgaaacgggcacgtgattgttctttttctggccggtcacccggttgcgctgttttttgcccattatgttcactcctttttctttaggcttgtcatcccgcatattctgcccaagatcgccctgatcatgctgatgattgtctcttaccgttattcagtgtacaatgggtgggagtttgaataggcaggaggaaaaggaaatgagtgtacatataaacgcagaaaaaggtcaaattgcggatacagtgcttttgccgggagatccgctccgagcgaaatttattgcggaaacttatcttgaaaatgtggaatgctataatgaagtcagaggaatgtacggatttacgggtacatataacggcaaaaaagtatcagtccaaggcaccggcatgggtgttccgtctatctctatttatgtgaatgaactgattcaaagctatgatgttcaaaacttaatcagagtcggctcatgcggagccatccgtaatgacgtgaaggtgcgtgacgtgattttggctatgacgtcttcaactgattcacagatgaaccgtgtcgccttcggcagtgtagattatgctccttgcgcagacttcgaactgcttcataaagcgtaccaggaagcgcaaaaaaacaatcttcccgtagcggtcggaagcgtattcaccgccgatcagttttacaatgaagactcccaaatcgaaaagcttgccagatacggcgttctcggcgtagagatggaaacgactgctttatatacgcttgccgctaaatacggcaaaaaagcgctgtctatcctgactgtaagcgatcacgtattaacgggagaagaaacaacggcagaagagcgtcaaacgacttttcatgatatgattaaactggcgttgcatactgtatcgtaaacttgagatgagggttatgctgattaaagcagccctcttctttatgcatcgccctgattcaaaaaaagaaaggtaagtgtaaaatgaagaaatccactaaatggttctcgctcgctgccgctctcagcgtaaccgcaatcgtgggaaccggctgcagcatttcaggcggcgacagccacaaggacacaaaaacagcagctgaaacaaaacaatcagatgacacatcaagcaaaaaaacaacgaaggcagaaaacagcgattttgtattggagagcaaatattttaatgatattaaagaagtgaacgggcttgagaccattcaaaacccgacaaatacacttgcgctcgtgaataagacatacacgctgccgggagattataaaccgaatgatctcgtgatcccgaaagtcgaattttcttttactgagaaaatcgagaaacgatatatccgcaaacctgccgccgatgctttggcgaaactattcagcgccgggaaaaaagaaggttatgacctggttgccgtttcaggataccgctcttatgacagacagaaagttattttcgataatgaagtcagtctgaaaggtgaaaaaaaggcgaaagaagccgtcgcatatccagggcaaagcgaacaccagacggggcttgccatggacatttccagcaaaagcaacggatatgagctgaatgaagcgttcggaaacacggcggacggcaaatgggtgaaagaccatgcgtatgaatacggctttatcatccgctatcctaaaggcaaagaaaatgtcacaaagtatgagtatgaaccatggcatttacgctatgtaggcaaaaaagcggcaaaagccatccatgaccatcaattaacgcttgaagaatattttaatgaagtaaagaaagtgtaataagaagaagcccgcttgaaaaatagaaagcgggctttctttattaccagaagagtaaacctccaagcgcaaatccggtaatgaaaccaaggccgataccgtaggctgctccccagcctccccagcctccccaatagccgaacccgtatcctctgtgacggccgccgacaggggcgatatacactttgctgttagtcacccgtacgattcttccgacgtggactctgccgtttcgttctgtaattcttgctacttttccctggtgctgccggcaaagatgataatagttttgcatcttttctcctcctatccaacctatctttctatgtcagcttatgatagagtgcggtaaaaaggttggacgaaaacaggaggacaatcgccgttttacttgtaagcgacaaaagcgcagtgtcccatatattcacggtacgtttgcataagctcgtaatgagccgtcagcgtatcgtagtgaaccggctgaataacgggcgataaatccatttctgtagtcggctcccgcgcattgttttcatagacagcgggaatgaaatccgcgttctgaaagccttgctgaaacaatctctgtttccatgccgtttcatcctgcaatacggtaaaaccgtagaagtcttttatctgcgtgatggcgttttccggcatgggcttttgtaaagcagcttcaatgccgatcagcatacccccgggtttaaggacccgcaggatttcagacagcgatgaatcaagatttgaaaaggtgagaactgattcggaaagaacggcggaaaattgattttcagcaaacggaagccgctcaagctccgccaaatagcccggaatggttaagccttcagcggcaaatcgttttgctgctttttcaagcataaggggatccttatcaacacaggtgacggggtacagcaggtggccgagataagcggccgtctgtcccgttccgcagccggcgtcaagaatcggttcgccaggaggaggagccgcttttgtgagaacggctttggaaaaagcgagcccgccggggtgagcccctccgactccgaataaggacagcatttctaaatatttgctcaaaggccgaatcctccttttttcctcagcatatgttgagagaaaagcataggtttgggtaaacgggaaagaagggcgcctcacgtttgaagttgacgaatgagcgttcgtctatgataataatgtaagaataaaaaggtggtgttttcttgaagcggcaatttaaactgttttttattatattgatcactgcggtcgcagcctcggcgcttacgctgtttatcacgggcaatacgaccattttcggacaaggctcggctgctttgacgaacagcaaatttgagaaattcaataaagcctacgagcagattaaaagtgattactatcaaaaaacagatgacagcaaattagtagacggagcgataaaaggcatgatcagttccctggatgatccatattcttcttatatggacccgcaggaaggaaagtcttttgaagaaacaatttccgcttcgtttgaaggcatcggcgcacaagtggaagaaaaggacggcagcatcctgatcgtatcgccgattaaagggtcacccgcggaaaaagcgggggttaaaccgaatgaccagatcttgaaggtcaacggcaaaagcgttaaaggccttaatgtaaacgaagccgtcgcattaatccgcggcaaaaagggaacaaacgtcaagcttgtgctgcacagagcgggtgtcggcgatctgaacctgtcgatcaaacgtgacaccattccggttgaaacggtgtactctgaaatgaaaaaaggagacatcggcgaaatccaaatcacatccttctccgaatcgacggcaaaagagctgaattcagccattgacagcctcgaaaaacaaggagcgaaaggatacattctcgatttaaggggcaacccgggcggactgatggatgaagccatcaaaatgagcaacatgtttatcgataaagggaaaaatatcatgcaggtcgaatacaaagacggcacgaaagaggtcatgaaagcgacgaaagagcgcaaagtgacaaaaccgacagtcgtcctcgtcaatgacggcaccgcgagcgccgcggaaatcatgtcggctgcgctgcatgaatcatcgggcattccgctgatcggcgagaaaacgttcggaaaaggaaccgtgcagacggcaaaagattacagcgacggttctaccgttaaactgacaatcgctaaatggctgacagcggacggagagtggattcataaaaaaggcatcaaaccgcaatatcaggttaagcttcctgaatatgcgagcctgccgtatttagatgcgaaaaaaacatacaaatacggggattccggaaccaccgtcaccaatgcgcaaaaaatgctgaaagcgctggggtacagcgtgaaagtaaacggcacgtatgataaagcatttgaacaagcagttaaacaattccaagcaaaagagaaactgaaacaaacaggcattataacgggagacacaacggcaaaattgatgacggatctgcaaaaacagcttgcggacaacgatacacaaatgaaaaaagccgttgaaacattaaataagaatatgaaatagtaaaaaacacccgatgcgccgctcgcgcattgggtgttttttgtttgcgaaaagcccgtcttatgtcgtttcctgttcaaaaaggtggctgttcgcctgaatgaaaaactgtgattgctcatagtgataggtgacttttgagaagtcaaacggctggccgttggttaaatgaaaaatcgtttcaacgcatagcttaggcgctcctgtaaacagacctaagtactccgcttcttcctcatttaacatccccgcgtacagatataaatctgaaaaaccgcgctttaacccgagaccttctcgaatataatcaaatattgattctgccacgatctctttattcaaatacgtaataatcgatttgttgtaaaatgactcttcgatacacaatgtcagcccgtcaatatatcggattcgcttgacataatacacgtcgccgtcaggcggcatattcagattttgggcagcctcaggcgtgggttttctcacttccagcgctaataatttggaagtgacattaaaatcttcaagtgattctttaaatccctgattagaaagcagactgatatacccttttcttttattccgtctgacaaaaatgccgcttcccctcacttgaaacacaatcccctttttttctaataaatctaaggacttggtgatcgtgcttttgctcacgttaaaccggctcattaaggtttgcagcacaggcagtttatccccttgctgcagctgatgttcttctatgtatttttcaatatctatcgcgatttgctggtattttaacatatacattcctcattcatttattgtcccgcttctttcagaattatagcataatcgtttttaaaagccatttcgtaaattaactataattgtttatgtattgataaattataccggtacaattataatgaaaacgtataatatgaaaataaaggcaggcattcttctgcacttgcgaagcggatgcttgaagcggctgcagtgcatttattcggcatgcaagcggcagtcaaataaaggaggatataaacgatggggacattgccaaaagattttttatggggaggcgctctggccgcccaccaatttgaagggggatggaataaaggcggcaagggaccgagtgtagtggacgtcatgacggcaggcgcgcatggtgtgccccggaaaataacagatacaattgaagagcgggaattttatccgaatcatgaagcgatcgatttttatcatcgttataaagaggacatcgcattattcagcgagctgggtctgaattgtttaagaacgtccatcggctggagcagaatttttcctaaaggtgatgaagccgagcccaatgaggaaggattggctttttacgaccgggtgtttgatgaattgctgaaacatgggattgaaccggtaatcacgctgtcacattttgagatgccgctgcatttggcgagagaatacggcggtttcagaaacagaaaaacagtcggattttttgtaaaattcgctgaagtgtgttttgaacgctataaacataaggtgaagtattggatgacgtttaacgaaatcaataataagatggatgtgaataatccgatctttttatggacgaactcaggcgtcgccgtcaaagaaaacgaaaacgcaaaagaagtcatgtatcaggccggccatcacgaactgctggcaagcgcattggctgtttcgaagggaagagaaatcaatcctgagttcaggatcggcgcgatggtatcacatgttccgatttacccgtactcatctcaccccgacgatgtgatgctggctgaagaaacgatgagacagcgttttttcttcccggacgtgcaggttcgcggatattatccaagctatgcgttaaaagagtttgaaagagaaggctatcagatacactttgaagacggtgatgaagagattttgaaaaacggccgagtggactacctcggattcagctattacatgtctacaaccgtaaaaagtgatgtatcaaacgataataccggagatgtcgtaaacggaggattgccaaacggcgtggaaaatccttatattacagcgagtgattggggctgggcgattgacccgaccggtttacggtacacattaaaccgcttatacgaccgctaccagattccattatttatcgtggaaaacggattcggcgccatcgacacattagaagaggacggttcaattcatgacactccaagaattgaatatttatcgtcacatataaaagctttgaaaagagcaatcacatatgatggtgtggatgtaatgggctatacaccatggggaattattgatatcgtgtcatttacaaccggagaaatgaaaaaacgctacggcatgatttatgttgatcgggataatgaaggcaacggttcaatgaggcggcttaagaaagactcatttgaatggtataaaaaagtgattgaaacaaacggctcatatgtatcttaaaggtgtaaaaagggaaggcttcaccgttgtgtgaagccggctttttatcagtaattttgaaagcgcattcattcaagcgggaaggaggtgactgtccggctattcaattagaatcgcttataaaaataaggaaagggatggtggttcatgttttttaaaaaaggtctgcacataacgctggtttttcttatgtttttctttttcatatcaagcagcatggaaaccgaagtgtatgcagctgatcggaaggcttcagacaaaaacaaagtaagggtgtggttcagttctgaaaaagatccggcttcccgtacgtggtatgacgggccgctagaagtgaaatacgccttagacgaacaaacaccgcttacattgacaaaaaagaaggcttctgactccgccgctgtgtatattgatccgtcgcgccgctatcaaagtgtgttaggcgtaggatcgtccctggaagaatccacaatccataatttatcaaaaatgacacccgcaaaaagaaaagaagtgctgaaaaaactcgttgatcccaaagatggtatcggaatggacgttatgcgcataacgatcgggacatctgattttacagcacaggaattttatacgtatgacgatatgcctgaaggccaaacagatcctaagctccgtcatttctcgatccaaaaggatattgatttacacattacagcaaccatcaaggaagcgctggcgataaatccggaactgaaaatcattgcctcaccgtggagcccgccggcttggatgaaaacgaatgaaaacctcaagcggggaaagctgaaagataaatatatcggcacactggccgtttacttccgcaaatttattgaggcgtacgaaaagcaaggaattccgatttatgcgctgacccttcaaaatgaacctttgctggaaatcgactatccgagcatgtatatgccgccgtctcagcagcgtaaactggcactggccttaaaaaaagaaatgaaacaacacgtaattgacacgaaaatttggatttatgatcacaatgcgagcggggcgtggaactatattccgccgattttagatgataaaaaaggaaaccgggcggcagacggcatcgcttttcacgattatgacggtgacctttccgtcatgtcggaaatcggaaagagatatcctgataaatctattcacttaacggagcggtctgtctgggggacggcaggggcggaccggatcgcgcagtatttccgcaatggcgcgtcgagctacaatgcgtgggtgacgatgctcgacagtcaaatcaagacgcatcattggataggcaccccagacccgacgctgtttattcaggatgctaaaaaccctgaccgctattggaatatcccgatctttcatatgacaggcaacttttcaaaatttatcgaccggggagcaaagcggatagaaagtaattacggctccaaaaacacagtctcgaatgtatcgttccttaatcctgatcaatccattgtgacagtcgtaatcaaccagacatcttcagaacaaaaattccatgtcgtttcagaaaatcagcagtttgaagctgtcatcccagctaaaactgtggctacctacaaatggaagtgaaaaaagtaaaaaaccggcacatttacgtgccggcttctttctgttaagcgcctttttggttcagttgatcagaaggcgctttattgaataaaccgtctttgacggcgtttgaagccgctttttttacaaaaaacgggttgaggataataacggctgccatgttagcggtcaaaccccaaaagccttcatatataccgtgggcggattgggtgatatttaccgtgaatgtcacgataagaccgacgagaagaccgataattgtcgcttctttcgtttgattcttccaaaacagactgacggcgatagccggaaagatctgaaccatgccggaaacaccgagaagctgaagggtaacgagcgcggtcgggaacagcatgccgaataaaagcgcgagtccgatgacgacaaataccattgaacgggtgatcatcgtcagcttgcttggtgacacattcgggtgaatcaaatcccgatataagttattcgcaaataagtttgatgctccgatggccatgatagagcagggaatcaatgacgcaagggcaatcgtggagtaagcaaagccctgcgcgactccgccgtaagacgtttgaatcagcttcaataaagcaagccgcggattggtatcttccggcaggacaagaaacgcgataaagccgagaaaaataacaagaatcaaaacaatattataaagcggcagaaacatgctgtttttgcggacggcatctgcgctttttgccgtaaatacgccggttgccgcatgcgcccacataaagagcgccagcgcagatacgatggaagctgtgataaaccaaggaattcctttcggccccgagtccggaatcgtcagcatttgcggcgctttttcagccaaagtgtgaatcatcggcgtccagccgtgaaaatggatcagcgggagtgacacgaccataaacagcataatcacccacacgagaatgtctttaataatcgccgtaaacgtcggccctttaattccgctgaaaaaagtataaagcgctacaagaataaaagagatgatgacgaccatattgacattaatgacacccgttccggccacctgaagcgtatcttgaattccgctcagctggagacaaatataaggaatgagcataagaacgccgacaatggcgacaagactggccaaaagtttactgtcaaaacgctcacgggcataatcggcaagcgtcgttaatttgtgtatttttgccactttccacaactttggcagaaagaaataagcgataaaatacgccaaaacagaatacgggattgcaaaaaaagcaacgcttccccctgtgtaggctgtgcttgttaagcctaaaaacgtataagccgtatagagatccgcgccgactaaaaaccagacgaggagccccccgaaccgtctgccgccgacagaccattcctcaacagaagtgcgtgatgatttgtctctcccggctataaagccgatacagacaacggttaaaacgatgacggctgtaatgatcaatgctgttatatttgcgggcatcagtccagtcctccttgtttcttctgcagcctataaataagaaacgaacataatggagtgactgcgatccataaaagcagccagaaatgaaaaaaaggcagcccgataatgatcggatgaacccgattagcggctgacagcagggccagctggctgaaagggattaagatgagaacgaaaattagtgcttttctgaccatttactttcctcctgaaacttgataatgctccttatcatagcaggtgtcagataagatcacaagatatttttcagaaaaaaaagaattctattgcttttttaactgaaacactttagttgcatcttcattcatattaaattaaaatagttaatatctcgaaatcaagatatttaggagtgaatacattgaatacacaaggattgcaccatgttaccgcatttgcaaaagatcctgctgaaaatcttcggttttatactgaagtgctgggtttgcggctcgttaaaaaaaccgttaattttgacgacccggccacttatcacttctatttcggcaaccaaaacggagagccgggcacgatcattacattttttccttttcagggaagccgcccgggaaccgtgggaaaagggcaggccggaagaatttatttctccgtgccgaaaggagcactcgcgttttggaagtgccggcttgaagaaaacggcttatctgtaaaagaacagatcatgctgtctgaacaagtgcttctctttaatgatacagaagacctgccgcttgccataatggaagatgaaagaagcggacagagtgaatggactcctgcgggcattactgaaaaagaagcgatcacaggcatgagaggtgttcttctgtactcgtaccgtcctgaagcaaccattcaatttctcatagaacgcttcggttattcaaagacaggagaagaacagcagattgtcaggctgcaatcggaggcgcggatcggacatattattgatgttgaccttgcgccgaaagaagcaggtgtcggcggttacgggacggttcatcatgtcgctttccgcactagcaaaaaagagcaggcggagtggaaggatattcttgctgattctcatcttgattcatctgacattcttgacaggtcttactttacatcaatctatttcagggaaagcggcggcattttatttgaaatggcaaccgatgaaccgggctttatgacggatgaatcctttgaaaatctcggaacagagctgaagcttccggaatggctggaagagcatcgcagccagattacagctgttttgcccaaaatggagaaaggagaatgatgatgaaacatgtgtttgaacagggaacgtcagaaaatgttctgctgcttttgcacggaacgggaggaaatgaacatgatcttctgtcgctcggacgttttatcgatccgaacgcaagtctgctcggggtcagaggatcagtgtcggaaaacggcatgccccgtttttttaagcggctgaaagaaggcgtatttgacgagaaagatttaattgaacggacggaagaattaaagaattttattgatgaagcggcgcaaatgtacggattcagcagagaaaacgtgattgctgccggctattcaaacggcgccaatattgcagcaagtcttttgtttcattataaagatgtactgaaaggagctgttctgcatcatccgatggtgccgatacgcggagtgaagctgcctgatatggaagggatgcctgtgtttatcggtgcaggaaaacgcgatcctctatgtacaaaagaagaatcggaggagctttatcagtatctgacagatgcccatgcatccgtttctcttgtttggcaggagggcggtcatcagctcacacagcaggaagcagagcaggcacgaacctggtacagtgagcgattcctataaaaaacccttagtccgcttaagcggactaagggtttctttcatcttacagccaagttgacactttagatacaggcagccggttgcttttatgcgccggcttaacggctttaccgattgaaatcagcatgacgggcacgaaacgctcgctcacgtcgaattccttaacgaattgctctttattgaatccgccgatcgcgcaagtgtcgtagccttttgctttagcggcaagcatcagttgcatcgctgctaaagaagcgtttaaaaatgctgaatcacgggcaaactgatcattttggtatgcaccgttaatctggcctaaaagcgtttgtttaatctcttctgtgatattgccttgctcagccagttcagcataaacgtcttcaccattttcatttgcttttaaatcgcctaatacggcaataactgctgatgaatcaataatctgtttttgattaaaagcaaccggaagcagggcagcttttgcttcatcactgtgaaagacttgaaaatgccaatgctgaaggttccaggcggaaggcgcttgcgttgtgatttcaaggagttctgttaattcctcttttgtaatgaccgcgtctttatcgtattctttaacagatgcgcgttcctttaaaacgtctaatacggatgtcatcatgtttcctccttcggataaacgtgttatcataatagaaaagttagaagcttactaaatgtaactcgaaaactaattttaatggatcacaaaaaacttgtcaattcatagatgaagggatgaactcacgtgggatatacaatgtgtcctaaaatggaatccgctttttcccttttgggaaagcgctggaacggcctcattatccatgtactgatggacgggccgaaacgatttaaagatatgaccgaaacgataccgacaatcagccaaaaaatgctcgcggagcggctcaaagagctggaacaaaatgaaatcgtcgagcgtcaggtgctgcctgaaacacctgtcaaagtcatttataaactgactgataaaggcttggccctgcaagccgtttttcaggaaatgcaaaaatgggcagacagtttttgcgagcccgggggatctgccaacgacacatgtgatgaataacaaaggctgcccaaggcagccttttcttaatgatcatgtttactcttcataaaaaccattaatatcaaaattgttcagattgaggttcaagccttttaattgctttaataaagcatcgaatgtaaggaaatgatcatttttacattccgccgggacatcatttggagaaaatagtttcattcctccctcaatccactgtttccggtataactgaaatgccgcttcaattaaatgatcaggcgttacaataaaccctaagcttatttcatggtcctcgctgtagccgaattcaaacccgcagcaggggcaaatatcaaatgttttttgatattcgccgttataaacgggacttgtctctaatcctttaaatccgcatatcaaacaagggtacaactcactaaccaacatacatccctcttttattcagtttgcaatcattcagaacaagcggggaggccttttacagtttcccggttaaaaactgagcctcaccaagcccgaagctccaatcggcgttcccgttttctgtaatggaaatcatgatgtcctcgggtgatatgccgcattctgttttaagctgatcagccatcagttgatataacgtttctttttgatgttcggtgcgcgctttgctgacaatgctgatgatgacaagatctttgcttcttttgaaaccgagcccggtatcttcaatgataagctcatgaggccgatgctggtgaacgatctgataacggtccgttacagggacgtcaaaagctttaaccatggcgtaatgggcggtatccagtaatttttttaatgctgcgtcatcccggccttcaataacgtcaaaacgaagtaatggcatattttattccccctgatggttttttatcatgtcgcaacttgtaaaaaagtataacagttaatcaaaatgtaatcaaattataaccaaaatatttatacattaatgcaatatcacagagaggcacatgttgttacaatcgcccaatcaatttcctcattttatgaatacgcttaagaataggcagacataaaggaggaaaaacatgtaccctcgtcatgcattgtatcgcgggaatttcggtcctgccggatttccggcgagaagtccttttttgttcggcgctcctttattcggcggatttttaggcggtcttctcggaggcgtgattgccacaggctttacaagaccccgctatccgtacgggttcgccggttacggatacggaggcgtcccatacggcggtttcgggccgggagccggcggttatccgccattttattaaagaaaaaacggcctgcatcgcgcgggccgtttttttatcttaaaatctccacttccgatagattgtagtcttcctgttttgaaaacataacttcaatcatcccgtctttatagactgcttttgttcctttccgtttgacgaggctcggaaggacgatttctttttttccttctcccagactgctgttctctacaacgaggctgtgtgacgtatgcttaatcctgatacggtcgagttcctcttgttctgcgggaattttcgcaaaaacatgatcggatgtttcaaaaaggtcaatttccggcttgggcggctccgcttcgaccggatcggcctttttggacattgggtcgcgaaaagggaactgtccggcataaccggcgccgaatacgctttccatcactcggttgacatatgtctcgacatctttcggatcagcatttttaaacgtttctttagagaactgattttggaagggaaaatatctgttccaatcaaacacggcatctcaccctttcttaacggacaacatagtatatgcccgccggaagcttcccgtgatataatataatctgtttacagaaaggaaggggaaagccgtgcaagggaataacgcaagaaaaggaatcatttataccgcttgttctttcgtcatgtgggggctgtttccggtctattggaaacttcttgaacaaatacccgcattggatattttagctcaccggattttatggtcatttgttttcatgtgtgtgcttttaactgtgcttaagaagtggaaaaccggatggcgtgaactgcgtcttttgaaatcggaagggggcctgctggcgctttttttcgcttccgttttaatttccgttaattggtttgtgtacatatgggccgtcaatcacggctttttgcttgaagcaagtctcgggtactacattaatccgctcgtttccgttcttttgggcatcctattcttaaaagaaaagcttaacaagatgcaaacagcagccgtttctattgccggggcggccgtgatcatatctgcgtttcaatatggcgcggttccttatatcgcattgctgcttgcattcagcttcggcctgtacggcttatgtaaaaaaagaacccgcatgtccagcacgatcggactgacgctggagacgcttttgattaccccggctgcacttatttatttaggatatacagctgacgggagcacttccgggtccttgggggcaggaacatgggcgctcctatttttcgcaggcgtatttacggccctgccgctgttgctgtttgcagagggggcaaagcgtctgccgctgtatcaagtcggcattttgcaatatatagcgccgaccattacccttatgctcggcgtatttgtgtatcatgaaccgttttccgggcaaaaagcgtttaccttcatttgtatatgggcagcattgcttttgtttaccttttcacagataaaatggaagcggccgataaaaagccgctaagcctttcgctttccagcgatagcttaaattatgtataatcattacgagtatgtaaaggagctgtacaatgggcactgataaagacatagcaaaagcctatcaggcactgtggaataaccgcactctcccggcttcaactcttgaagaagcggagaaggcaattgatcttgaactgcttgatcaaagaacacatccgaggctccggaagtcacccgaggaaaagtttgctctggcggtgcagcgaattgtagattcccggctgcggccgattgagaaatatgaattggttgaactacatacgaagcgtttgcaatttttaaaagaagaaagaggggagcagctatgaaagcgatcataaaagaagatgtgcaaacttctttagagcgatatgccgatcgtcctgtatatatccatttggaaacaacgaccggttcttattcagcgcatctgaatgagaaaaacatgacggttgtagcctatatacgcaatgcaaaagtgacgtaccatcaggcgaaaatcaaaggaaacggcccgtaccgcgtcggtttgaaaacggaagaaggctggatttacgcagaaggtctgactgaatatacagtagatgacgaaaaccgcttgttaatggcagggcatctgccgggcggaaaattggcgatttcgcttcaaatcagcgaaaagccgtttacagtttaaagaaaagggtgaaaatcatgaaagaacatgtactcgtcatcctgcctcaccctgatgatgaatcatacggagtggcagggctgattgctttacacagacaaaaagatattcccgttacgtatgcatgcgcaacgcttggcgaaatgggccggaacatgggagatccttttttcgcgaaccgtgaaacactgccgctgttaagaaaacaagagctgatcgacgcatgcaaagcaatggacgttactgacctgagaatgctcgggcttcgtgataaaacacttgaatttgaagatgacgagtggctcgctgatatgatggaagagattatcgacgatgtaaaaccgagtctgattgtcacattctatccggagcacggcgtccatccggatcatgatgcatgcggcgaagcggttatcagagcgctttacagaaagaaaaaagaggaccgcccgcgcacgctttgcatggcaatcacccgcaacagggaggaagccgtcggcaagcctgatgttattcttgatattaaagaggttgccgatattaaaatgaatgccttaaaagcgcaccgcacccaaacggaaggcatgctgagagagctggaagaaaaaataaaaaataacgagccggttcttcagacatggtttgaagaagaagtgtattggacatatccgtggaaagactgataaaaaaagggataaggctgaaatgccttatccctttttttgtgtcagatcggaagcgatcgcttctgcaagcgaagaccttattgataaatttgaaaaactcagtcccagctgcactgcggtttgggcgatttcaggacggattccggataatgtcgctttcacgccgagcattccgagtgattcaattaaggtgaaaagctgttgggcaaccatcgtatcaatcatggctacgcccgataaatcaatgtacagctgcgtgatgcgcttctctgaacactggtgcagcgtattctccaaaatcattttggctcttgccgtgtcaatatccccgatcagcggcagcagtccgacattgtcaaaaagcacaattaccggcgagctcagctcggtaatcaattctttttgcgcttcaagctgaatgtttgtgtttttatacatttcctctatgaaaatatgaatgaccacatcaaaagatttaatcagcgtatggaatatatcttcggcatcttcttctgtcacggtgtctgaatgaagtctggtaaactgcttgacatggccgacatacaaatcacgaactctgataaactcgcgaataatataatggatgggagtttttaaatgttctttatcccgtgcggcttcaaacgcccacttttccaatgccgctgtatatacttccttctcttcagaaaaaatccgattgagttgataattaaacgccagattttgttttttcagatttgtgagtacagccgggtcagtagaagcataaacagaatcaggatccgtttcatgaagcgtatcaaaccatgtctgactgatgtcctccgcccgttcagttaaataatcgtacagcagtttatgttttggcattgctgctcctcctttataaaatcgtcatttttttcacataacgcttttgcagcttcatcagtctgaagaataaaccgacagctcctgcggcaagtcccgcaattaaaccgatccagtagccgtatgccccgaggcccgtataagtgccgactgcgtaaccgaccggaagcccgataatccaatacgacacaaaagccgcgccgagtgtataattgacatccttatatcctctcagagcgccttgtatcggagctgctacggcatcagaaagctggaaaaacagcgcatagattaaaaagtgctgcgtcaacatgagcaccgccggatctgatgtatacattccggcgatttgcggtctgaacagcaaaatgaaagccgccgtgcataaagaaaaactaagcgccatcacgatcccgatatagctgtatgagcgggcatccctgtagcgctttgcgcctgcttcaaagccgaccaaaatggtcatggccatggatacgctgagcggcagcatatacaagagggaagcaaaattcattgccgcttggtgggctgcaatcgtcaccgtctgaaaatggctcataagcagtgtgacagccgcaaaaatgctcgtttcaaaaaataccgcaaaaccgataggcaatccgattttcaaaagcttcctgcattcagtcggagaaaaacggtacagtttccgaaatacagagtacccggcaaacggctcaaatctgcagacgataaaaaagctgatggcgcaaatacaccagtaagtcagggcggaagcgagccccgccccgactcctcccaatgccggcatgttgaatttcccgaaaataaatacataatttaaaacaaaattaataggcaatgagcaaagcgtaataagcatagtgactcgcgttttgccgagtgcatcaataaacgagcgcaaaacggtgtacacaaacaaaggaaaaataccgagggataaaaatcctaaaaagtgtttggcgatcgtccggacacgaggttccaggcccaaatgtcccaagatcatatcaacggtgaaaaagccgatcaggataaccgccgcactgagaacggccgctacataaacggcctggatgacggaaaacggcacttccttttgtctgccggctccaaacagctgcgaaacaacgggcgtaacggccattaatattcctgccaggcccgtataaaccggcgtccacaggcttgaaccgattgcaaccccggctaaatcggcagcgctcactttccctgacatcaccgtatccaaaaaggtgatcagggaaaggcccgcctgtgtgattaaaatcggaatgaagatatgtaacagctgtctgaccttttggccgatcgtgttcgtttctctcaagttaggttccccgtttctttattttaacgagagaaattataacattttatgtataaaaagcaatgaaagccggcctactcttttttgtccggtttcggctttttaaacatcttggcataaatgaatgaaagtgaaatgacccctaaaaaggtgcagatatattgcatcagccgtgcgaattccatatgatgtgcgcctcctttcatgattatggtgcacacagcggcgcatatccatgcgcgcgatgcagaaaataagggaaaggagctgatgtgacatgcgccacactcaaatgacggaaagcgcgtttaccgctgccgttcaaacgtatttgaaacaaattacggaggatgccggaatgatactgcggacattggatgaaaaagaccaatgccttctttgcgaattagatgaactgggacatacgtttcaggaaatgcaggctgtcgcttcgtcgttttacctgcagtcatatatcgaacactttacgccttcctatacagagctggcgagggccgtgcagcatctggcggaagaaaaacacggagcgctgattgtgattgaacgtgcagatccgctggacggaatgatacaaaaagggaccagcctgcatgccgagatcagtgcagctttaattgagagtattttttatcccggcaatccgcttcatgacggagccgtattggtcagagaaaaccgggttgtatcagcagccaatgtgctcccgctcacaacaaaacatgtcgatctcaaatacgggacgcgccacagggccgcgatgggactttcggccgtgactgatgcactcgtgctcgttgtttcagaagaaacgggaaaaatgtcctttgctaaagacggcggactgtatccgcttgtttcgccgcgggcgcttcatacgaaataataagaaaatgggaatattgtacccatttaatattaataaggtgaacatctttacctttttctgtattgatgttatcgtttaaatatacataaaatttaaaagaatagggagtggaaagatggcaaatgtattgatgatcggctttccgggagaaggccatatcaatccgtctttaggcgtcgtaaaagaactgaaggcaaaaggggaacatgtcgtatattacggcgtgaaggaatatgagaacaaaatcgcgtcaagcggagcggaattccgtgaatatgaagatttccgaaaagatgaattcggaaaaaatgcaacgggtgatgaacagcgggacgctaccgagtttttgctattaatgattgagacttccaaaaaagccgcactccgtattcttgaggaagtaaaagatgaatcctacgactacatcctgtatgatcatcattttctggcaggaaggctcgtgagaaaccagctgaaactgccggcatattcactttgtacgacatttgcaatgaatgaagcatttattaaagaagtgttttcaaatacaaaccttgtatcagaggaatcatctcattatccggcttataccgaagcggtcagccggctcaatgaagaattcagcgcagacattaaaacgccgtatgatattttctcaaatgacggcagaaaaaccatcgtatttacttcaagagcgtttcagccgaaagaagaagagtttggcgattcttatctctttgtcggtccgtccataaccgaaagggcggcggctcaagatttcccgtttgaacagcttgaaggagaaaaagtcctgtttatttccatgggtacgatttttaacaatcagaaggaattgtttaataaatgcttaaaagcggtcagaaactttaacggaaaagccgtcatgtcaatcggcaaacatcttgatccggcggagcttgatgaaattcctgagaatgtcattgtcaagccttatgttccgcagcttgagatcctgaagagagcagacttatttatcactcacggcgggatgaacagtacgagcgaagggctttactacaaaaccccgatgattgtcattccgatgggcgcagatcagttcgccgtcggaagccaagtggaaaacacgggcgcgggcaaaatgtttaaaaaagaagatgtaacagcggaactgctcactgaagcaataaaagaattgagcgaaaatcctgaatatcagacaaaagcttctgaaatcggagaatccctgaaagcggccggcggagcacagcgtgcagcggaattgatagcagaagacgtgaaaactgccgagacccgggttctgtaatcagccgtcacccgcttcctttaaaggaagcgggctttttttgattgtttttcgggaggatttttcacgccataaagagaattgtatgaaaaacagacaagaaaggtggaatgtcgcggaaaaaagccatgttatgaaaatgattccaaagtcttttgtgaaatgttctcaatttatgtaaaatgtgtggcattggtgatgatctaaggccaaatgaatcggaattaatgtcgacttatgaatgaatcctgaataacaggcggcgtccaaagaaaaggaacgtccctttcagcaatgataaataggaggtttttcgttatatgaagaaaaaaatcgcagccggactggctgtatctgcagtaatgacttcaaccttcgccgtgcatcccgctgaagcaaaaaccattcaagtaaaaagcggcgactctctttggaagctttcccggcaatatcatacaagtatttcagccctgcaggcggaaaataaactgaaatcaacgatactccacccaggacagcggctgcacattcctgacggcagcggcaaaacggggcaaaagggaaaacgaagcacgggtgcttacacagttacatacggcgactcattatgggtaatcgcaaaaaaatacaaaatgagcgtttctgagctgagaagcctgaaccgtttgagttcagatgtcatctatccgggccagaaactgaaaattaaagggtctgccggcggcacggacggaggcggcagacagacaaagcctgataaaggcgcatcagggacttacactgtgaagccgggtgactcgctgtggaaaatcgccaatcaaaccggcatcaccatcgccgaactgaaaaagctgaatcaattaacatcagacatgctgtatccgaatcaagtgttaaagatcaaaggttcttcacataacggaaacagcggcacaacaccgccatctcattcaaatccttctgagaagccatccacttacaaagtaaaagcaggcgattccctctggaaaattgctaatcggttcggcatcaccgctcagctcatcagagaaaaaaataaattgacaactgatgtgcttcaaatcggacaagttctggtgattaacggaacgggaaaaacagaagatcctgtgcggcagccggataacaaaccggcaaaaccaaacaagccgaatactcccgaacctccggtgacagggtcaaagattgacagaatgataggcgaggcgaaaaaacatgtcggcgtgccttaccgctggggaggcaatacgcctgcgggcttcgattgcagcggttacatctattaccttttaaataaggtaagctctgtttcccgtctgagcacggccggatattggaatacgatgaaacatatcagccagccgtcagcaggcgactttgtcttctttacgacatataaagcgggcccttctcatatgggaatgtatttaggcggaggagattttattcacgcaagctcctccggggttgaagtttcaaacttaagcaatccgtattggaaaaaagcttatttaggagcgcgcagttatttttaaaaaaagcctttcggggctttttttgtttaccatttttacgttttgacaagactgatgggtaaaaaataagggggaggaagcatgaatcgtctcttgctttttctcatgctcgcatcaattacgctttgcggctgcgctcctgttccgcccaaaaaacatggggaaagccgcgcattggaagcatctgcataccgtgagcatgccggactcatcaatcaaaacggaaaaacgatcggatatatcgaagtgagggaatctgatgatgaagggtcagacattcatatatcagcggggcatctgccgcccggcacttctctcgggtttcatatttatgaaaaagggacatgtcaggcacctgatttcgaatcagccggcggtccgttcaaccctttgaacaaagaacacggcttcaacaatccgatgggtcatcacgccggggatctccccaatcttgaagtgggggctgacggtaaagtggatgtcattatgaacgcgccgcaaacttcattaaaagaagggagcagactcagcctgctcgaccgggacggaagcgcgttcgtcattcatgaacatacggacgattatttgacaaacccgagcggaaattccggagccagaatcgcctgcgctcccctgacaaaaagcgcccgcagggaatgagcccttttgtattgagtatacaagggcttttttagtatactcggttatggaatacaaatggaaaggaaacaccacctatgacttcagaattacagcacctatcacttccggaagatatacaaaacaaactgcaggcttatcaaaatcatcccgtttcccaagaattccgggatttaatcggatcatcaggctatgaggccgaagataaagcgattgtattcgatgccgtcattgctttgacaatgggaaaaaatatcttattaaaaggaccgacgggttcagggaaaacaaaattggcggaaacgctttcgaactattttcataaaccgatgcacagcgtcaactgctccgtagacctcgatgcagaagcgcttgtcggctataaaacgattgaaaatgaacagggacaggcgacaattgaattcgttcccggacctgtaacaaccgcaatgaacaagggacattttttatacattgacgaaatcaatatggcaaagcctgaaacccttccgattctaaacggcgtgctagattacagaaaaatgatgacaaatccctttacaggagaagtgattaaggcaagcgaaggattcggtgttatcgccgcgattaatgaaggctacgtcggcaccgttccgctgaacgaagcccttaaaaaccgttttgtcatcattgatgttccgtatattaaaggaagcctcctgaaacaggtgctgacctctcagtctgtcttaaaagatgagaaattaattgagcgttttatgacgctgtcttctgatttaatcgcacaagcgcataacggacaagtgtcagaagaagcggcgtccatcagggctctcattgatacgtgcgacttggctgcgtacatcccgccgaaacgggcgattgaaagaggcatcgtagaaaaacttgacgatgacagggaaaaagccgctgtcagaaatattgcagaaacgctgttcgaatgagggatatacaatgaagtttatcaaatttaacgacagcacgattgattcgtttttgttcatgatgctgactgacctggccaaaacactgaccagaagcagtgaagttgaagtggaatacggcgtgcagtcttactacaatccctttgaaaagaaaatttatatgagccacttttggaaagaccgatcagccggggatatggaagccggcctgaaaagcgatgtctatttgcgcgctgtcggaacacgcagcagctcatttcgggaatttgcggggtttttaaatgacgttcaccggcatttcacccgccaaagctttgccaagcagctgtttatgctgcttgaggatatcagaattgaagagctgaccaaaaaagaacggccgggaacgaaacgtgtttttcagaagcggagggagatgtacaggaaatatttcacgacgcagctgacattgaatttagaacggagcattttcaccgacgctttgtattgcgcgatgtttgtcaagctgacggctgagtctccgcttgaaggcattccttccatgcatgaacatattgatatgatgataccgtatattgaacgtcagctcatccgggtgtatgaggcggattctacggaacaaatcgcaagaataacggaagacctcatggaaggccttgatgaagtgcttgagaaagatatgctgaacacgtacttttttctgccggaacttgattacgaaaaagcggctgaagagcctttattcgaaagtgtaaaaaaagcgccttcgttaagtgacgatctcacgctacctgagtcttccgacggagatgaagaaatctttgaagagaaaatgaatacgtggcaccgggaaaccgaagcgccggcaaaaagtttccttcaatttgatattgagcacggcgcgaaatcggatcttgggaaagacgcggccagagaaggcgatgacggtgaccaggcgctcggctccgttcaaggttccgcacgtcagacgaaaagagaggattactccaaactggaagcgcttgaatccattcaggatgaacatgagggcgcggggctggctgacggaaaagaaaacaaatttgccttcccggtttatcaaacgcctcataaagcgtctcctgaagaggagcagtcttataaagaacaggcaaaaacgatagaatcatatcaaaaacgcttgaagcagatgatacaaaaaacacttgagcacaaaaaaacgctcccgcggaccgaccttcacgcaggccggctgaatcgcaaactgatccgctattttacggagcggaacccgcgccttttctataaaaagcaggacccgtcttcagacattgacgcggtttttacattgcttgtcgattgttcggccagcatgttcgacaaaatggatgaaacaaaaagagggatcgttctttttcatgaagctttgaaatcagtgtccgtaccgcaccagatcgtcggattttgggaggatacaaacgaagcgaccgaaacgagccagccgaatttcttcaataccgtcattccgtttgaagagtcgctgctgcaggcggcgggtccgctaatcatgcagcttgcgcctgaagaagataacagagacggatacgccatcagacaaatgacgaaacagctgatgcggcggagtgaggcgcaaaaatttttaatcgtgttttcagacggagagccggcagcattcggatacgaacaaaacggcatcgtcgatacgagcgaggctgtcatcgaagcgagaaaaaaagggatagaagtcataaatgtttttctgtccaatactgcaatagaggaatcacagatgaaaaccattcaggatatgtacggaaagtacagtatttttgttccggatgtcgatcagctgcccgatgtgctgtatccgctcttgaaaaaactgcttcataaaagcataggataggctttttcctatgctttttcgctttttattttaaaatgatttaattttttcggtattgatctgttttttttactattttgtgaacaatcaaggtagaatccaaacgcaatcagtggtaaaatatccttggaagcgtttttattacataattttgggcacagcgttcaaaagttatttcaagatagtgaattgatcacttgattatctaggttgggggtaatattcaaatgtttcaaaataatatgaaacaaagaatgaattgggaagatttttacggaccgaacctcggctacgcactggagctgtacgaccaatatgctgaagatccagacagcattgatccggatctgaaagacatgtttgacgaactcggcgctccgccaagccaaataaaagaggcatcgggaacaaaggaacagggacgcgtcaccgcagatctgattcaaaagatcgcagcagcagttaaacttgcagaagatattcgaacctatggccatctgaacgcttccgtcaatccgctcagaaaggatccgaaaaagagcgagctctttccgttatccgagtacgggcttacagaagaagaaatgaaagcaatacccgcgtctgtcatctgtaaggacgcacctgccaatataacaaacggcttagaagccatccagcatttacgcaatacctataaaagaaccatctccttcgagtttgaccatgtgcatgatttcgaagagcgcgcatggattacaaaaatggtcgaatccggagaactgttccggaaaaattcaccggaaaaactgtcagccgttttagaaagactgacggaagtagaaggatttgaacaatttttacaccggacattcgtcggtcagaagcgtttctcaattgagggattagacgcgcttgtgccggttcttgacgacattatcgcccagtctgtgaaagcgggcacaaccaatgtcaatatcgggatggcgcacagaggccgtttaaatgtgcttgcgcatgtgctcggcaaaccgtatgagattattttctcagaattccagcacgcgccgaataaagaccttgtgccgtctgaaggatcgaccggcatcagctacggctggacgggcgatgtaaaataccacctcggtgcagacagacagcttcaggatgctgaaaccaaaagcgcgcggattacgcttgcaaataacccgagccatttggaattcatcaatccgattgttgaaggaagcacgcgggcggcacaggaaacaagaacgcaaaaggggtacccggttcaagacgaaacaaaatcgctcgccattttaattcacggtgacgcagcgtttccgggagaaggcattgtcgccgagacgctgaacttaagctctctgaaaggctatcaggtcggcggggccattcatatcatcgccaataatatgatcggctttacaactgaaagcgatgaatcacgatccacgaaatatgccagtgatttggcgaagggctatgaaattccgatcgttcacgtcaacgcggatgatccggaagcatgcctgtcagccgttaaatttgcggttgaataccggaagcggttcaataaagatttcttaatcgatttaatcgggtacagacggtacggccacaatgaaatggatgagccgtcaacgacacagccgatgctgtatgacgccgtcagaaaacacccgactgtcaagcggatctttgcggaaaaactcgtaagtgaaggactgatcagcgaggaaaaagcgcaaaacatcgaaacgacagtgacaaaacgaattgaagacgcctataaaaaggtgcccgccaaaaaagaagacgccgtacgggaaattgaattgccggaaccggtgtccaacggttttccagacgttgacacagccattgattttgatgttctccgcaagctgaacggcgaacttatcaactggccggaatcttttaacgtgttcggcaagctgaaaagaatcctggaaagacgtgcaaaagcgtttgatgatgaccgtaaagttgaatggtcattggctgaatcgcttgcgtttgcttccattttgaaagacggcacgccgatccggctgaccggacaggattcagagcgcggaacgttcgctcaaagaaaccttgtgctgcatgacagcgaaacaggagaagaatttgttgccctccatcacttagacgactgcgctgcttcatttacggtgcataacagcccgctctctgaaggatcggttctcggctttgaatatggatacaacgtgtattcgcctgaaacgcttgtgatgtgggaggcgcagtacggggactttgccaatgcggctcaagtctattttgatcaattcatatctgcaggacgggcaaaatggggacaaaaatcaggactggtcatgctgctgcctcacggttacgaagggcagggccctgaacactccagcggccgcgtcgagcggttcctgcagctggcggcggaaaacaactggacggtggccaacctgacaagtgcggctcagtatttccatattttaagaagacaagcgaaaatgctgcttcgtgaggaaatccgcccgcttgtgatcatgacgccgaagagcctgctgcgcaacccgaatacggtatctgaagtgcaggaactgagcgaaagccgattcaagcctgtctatgagcagtccggtctttcccatgcttacgaaaaagtgactcgcgtcgtattatcaagcggaaaagtgtcaattgatatcagcgatcacttcaacaaaatggaaggcgataaggattggcttcatattgccagaatcgaacagctgtatccgttcccggcaaaagatacgaaggagcttttcgccaaactgccgaacctgcaagagatcgtttgggttcaggaagagccgcagaacatgggggcatggagttatatcagcccgtatctgacggaaatcgcgccaaaaggagtaaatgtccaatacatcggccgaagaagacgatccagtcccgcagaaggagatccgacagtccacaaaaaagaacaggaacgcattgtatctgatagcttgactcgcaaaaactaagggggaaatgaaaaaatggcggaaattaaggtacctgaattagcagaatcaatctcagaaggaacgatagcccaatggttaaagcagcccggtgattatgtagaacagggtgagtacttgcttgaactggagacggacaaagtaaatgttgaattgacagcagaagaatcgggtgttctaaaagaggtattgaaagattcgggtgataccgtccaagtaggagaaattatcggtaccattacagaaggcgctggcgaaagttctgcacccgccccttcagaaagtgctccagccaatgaacaaacgaaagaggaagcaaaagctgaacctgctgcacaagaagtcagccaggaagcacaatcagaagcgaaatccagaacggtagcgtctccggctgcacgcaagctggcaagggaaaaaggaattgatctatcacaaattccgacgggagacccgctcggccgcgtgcgcaaacaagatgtggaagcttatgaaaaaccggcttcaaaacctgcggcacagccgaaacagcaggctccaaaaacacagcaaagctttgacaaacctgtcgaagtgcaaaaaatgtcccgccgcagacagacgatcgcgaaacgattggttgaagtgcagcagacttctgcgatgctgactacatttaacgaagttgatatgacggccgttatgaatctaagaaaacgccgtaaagaccaattccttgagcaaaacgaagtaaaactcggtttcatgtcgttctttacaaaagccgtcgtggctgcattgaaaaaattcccgctccttaacgctgaaattcaaggcgatgagctgatcgtgaaaaaattctatgacatcggtattgctgtcgcggctgaagaagggcttgtcgtcccagtcgtgcgtgacgctgaccgcctgacgtttgccggcattgaaagagagatcggcgaacttgcgaagaaagcgcgaaacaataaattaacattaggtgagctgcaaggaggctccttcacgatcacaaacggaggtacattcggatcgcttatgtcaacaccgatcctaaacagccctcaggttgggatcttaggtatgcacaaaattcagctgcgcccaatagcgattgatgcggagcgctctgaaaaccgtccgatgatgtacatcgctttatcatacgatcacagaattgtagatggtaaagaagcggtcggattccttgtcaccattaaaaacctgcttgaagatccggaacagctgttgctggaaggataatttgagacagacaaaaagtacactgcccttacaagcagtgtactttttttattgagagaaggggagaatttatatgaaaagctgttatccgcttgagatcgaatttgaatataatgaagaattgcattctatcactccggttcttctgcaagacgaacatgacacgatattaatagactgcggatatcccggttttacaaaccatcttcaacatgccgctgcccggcatggaatgtcgcttcattcattgacaaaaatcattgtaacgcatcacgacatagaccatatcggctcactcgctgcattataccgtttacatccggatgtcagcgtgacagtacatgagcgtgaagcgccgtatattgacggctctaaaaaatctttacggcttgagcaggctgaatcaacgttttgttcattgccagaggatgcaaagccttatgcaaaacagttcatccgctctcttcaatcagtcgaatcggctccagttcaccggacagttactgacggcgagctgctgccttggtgcggaggcattcgcgttgtagccacgccgggtcatacacccggccatatcagtctttatctgcctgccgaaaaaactatggtcacaggtgatgcggtcgtcattgaagacggaaagctgaaccttgctaatcccggctatacgttacatatggatgatgcggtccgttctgtgcagcggctgctcgattatgatatccgccaattgatttgttatcatggaggtttatttcagggggatgtaaaaaaagcgcttttgcgtctgtttcgtgatctgcagaataaacaaggataggagcggcagcagcctatccttgttcagttatgaaaacggaatctttgccgtttcttcttcttcggcgctgtttttctcttttttcttagaccagtaggtggcaagaacagaccccgacagattgtgccatatgctgaaaattgcgctcggcacggctgacaaaggggagaaatgcgctgtcgcaagcgctgcgcccagtccggagttttgcattccgacttcgatcgcaatcgctttttgtgaagcataatccattttgaacagctttgcagtcaggaatcctaacaaatatccgattccgttatgtaagatgacgacagacacaatcagcagtcctgattgaagcacatgctcacgatttacgctgacgacagaggatacaatcgctacgatgccgattaccgacacgagaggaagcgcgtgcacggcttgtccgacctgttttttgaagaacagcttcacaatcaccccgaggacgatcggcaaaagcacggcttgcataatggaaacaaacagtgagccgaaagaaacggggagccactctttcgcaaacagcataataagtgccggcgttacaataggagcaagcaatgttgagatcgtggtgaccgcaacagaaagcgccgtattgcctttcgccaaaaacgtcatgacgtttgatgccgtaccgcccggacagcatccgaccagaatgacgcccgcggcgatttctgcggggaggcggagcccgattgataaacagaaagccgtaagcggcataatcgtaaactgggcagcgactccgatcacgacatgccaaggctttctgattaattctttaaaatcgtctgcttgaagagtaagccccatcccaaacataataataccaaggaaaatcgtcatataagaactgatccaagaaaacaaatcagggcaggcgaatcctaaaccggcaaagacgataacccacaagccaaaggtttggcccgcaaacctgcttatttttttcagccattccataaacacagctccttttacattcaatcaatcagtcagaaaatatgactgacttttctgtattccattataaataattttctgaataattcaatattaaatataagttttcaataaaattattatgtaaactaacatcttcttgactattcagacatatattcttacaattgatttttatactgaaatgaattgggagtgctgaagtgaaagaagctaatcaatggtcatctaagctgggatttattttagctacggccggctctgcaatcgggctcggcgcaatatggaagttcccttacgtagcgggaaccagcggaggcggcgcttttctgcttgtttttattttatttactgttttaatcggactgccgcttttgcttgctgaatttattatcggcagaaaaacacaaaaaaacgccgttgaatcctataaggcgctcgcgccggggaaaaagtggcactggatcggatatctcggaatcattacgtgttttattctattatccttctacagcgtagtggggggatggatattaatctacattataaaaggctttacaggcggcttatcgctttcttcgggatttgatacgttatttatcgataccatttcaaatccttatgcagccgttttcggccagctgctgtttatcgtgctgacgattttagttgtggcaaaaggggtgagcagcggaatcgaaaaggtaagccaggtgctgatgccggctctgtttattctgtttattctcttaatgatccgctccgttacgctgcatgatgcagcaaaaggattaaaattcttttttatgcctgattttggcgcgatggatgccaataccattttatatgcgatgggacaatcatttttctcgttaagcgtcggagtgtccgtaatggttacatacagcgcatatttagaaaaagaagaaaatattgttcaatccgccgtatcggtgacggtattaaatgtccttgttgctgtgatggcgggagtggcgatttttccggcggtgtttgcattcggcctcaagccggatcaaggcccgcagcttttatttaacgtgctgccgaccgtctttaaccaaatgccgttgggcatcgtgtttttactcgcctttttgctgctgtttttatttgcgacgctgacatcggctttttcaatgcttgaaattttagttgctgttttgtcaaaaggcgattcggcaaaacggaagcggtatgcgtggatcgggggacttgctatatttattgtcggggtcccttcggcgctgtcgtacggaattttgagtgatgtttctatttttcaccgcagtatttttgacgctgcggattttctggtcagcaatgtcttaatgccgctgggcgcgcttttaattgccgttttcgtaccgctgaaaatcccgaaacagatgctgtttgacgaactgaaaagcggttccggtataaaacgaaaatggtttgcagtctggctcctattaatccgttatgtggctcctgtagccattattatcgtttttctgcacgtgcttggtattttttaaaccaaaagaagcaggcccccgttcaagacgggggcttttttaataaagcggccatatcacgcggtgcgcttgctcgaaccgtttctccgcctcccgccaatcaacgacattccaccattgatccacgtaagccgctcggtcgtttttatattgtaagtaataagcgtgttcccacacatccagcggaagcaaaggaatgacgtcccactggctgtagagctgatgcttctcagcggccaaaatctccagccgcccggcgcgcggcgcccagactaggatagcccagccgactccttcgacttttttcgccgcttgagaaaattgctctttaaaagcggagtagcttccgaatgacacatcaatcatttgaaagagtgcacccgtcggccgtctttttccgtttggattcatcgaaaaccagaaaatactgtgcaaataatggcccgcgccgtgaaacgccaattgccgcccccaatgtgccactaagtcgtactgtttcgtctgtctcgcttttttgagctccagttctgctttattcagaccgtcaacatagctctgatggtgtttggtatggtggagtttcataatctctcttgaaatatacggttccagtgcggaataactgtaaggcagtttagggaggacatgcttgccgatcggcacataagctctgcgctcatccggctcttcgggttcagtaatgtcccggtaaagtgctgatgcttgttcgtaccattccgcctccgttaatccatcatcctgaagggtgtgaaaaatccggtcgatttgtgccgcgaagcgatcgaaccgaccttgctgaataacttgttccttcaaggtttcacaccaattcagcatttcggtttgataagcgtgccgtttcatttttcttcctccttttcactcattttcataaaagtgctgagcgcaagcaaagaaaacacatacgggtagctgtgatacctgatgtaaaactgcttcggcaggccgattccggtcggatagctgaaagcggctccttcgtaatgccggttttcaataagaaaagatatgccttttgtgacggcttgatgatgagttttttcgtattgcagcaaagcttcggccgcccaagccgtctgtacaagcgtcccgtaagaaagcggaacataggttttctcttctgcgcttttacaggattccccccagcttccgtcctcgttttgaatggacttcagccagcggatcgcttttttcacggccgggtggttttggctcacgccgcaagccttcatccctgtcagcgctgcccatgtgccgtaaatatagcagacaccccatctgccgtaccacgatccgtcctcttcttgatggcggatcagccattggacggccttttcaatctgagggtgatcagaagaaagccccgcttctcctaaacagtgcagcacccgtccggttaagtcgcttgttgagggatcgatggcagcttcctcagccgattccagcggcagcaggcggaccagcggatgattgacatttttctcaaaagcagagaagccgccgtcactgttttgcatggacaaaagccagctcagtccgcgttcccatgaggcgggataaagttttcgcggaatggctttgagcactgcggctgtgtcatcacaatcaggattatttgtattgatgtttgaaaaaccccatcctcccggttcagcatgcggattgtgaacggcccaatcagcgactttcgtctgctgccgttcacgcagaaaccgggcggcgctggttatcatctgatcgttatctgagatcccgcttttcataagcgcatagttgagaagcgccgtatcccaaacggtcgacgttgaattttccaggtacggtatatcgccgcaagacgtgagcaaagctttcgtgccggcaagtgcttttctgataacgggggagtggcgcgatacaccgagagcgagcaggccgtacaccataaaaatagtggcgctcgcatagctgtataatgtgccgtcttcttcaatccggtcaagcatatacgttttggccgtacgcagaccgagctggtgaaaagcggcaggaatctgcaaaagccgcttccagtgcgcgaaaagagaagagaggtctctgttctcatcctgatcggaacgaagccatgtaaacggatttttagtcatatgccgatctaaatgcgcgagagacggaacgttgggatttttcagcgaaaatcttttgttaagcgtcacggccatcggtacaaaatgaatacgggcgtatgtactgaactggtaaaaatgcagcgggaaggatgggggaatgactaagaaagataatggcagatgcagcgcgggccatggataaaggccgtttgccgcaagcatccactttgtcatgaagtgtacgttgcgcaagccgccatttgagatgataaagcgttcggcctgaatcatatgcgcctcagaacggctatataaaccggaagccagcaagccggcatagccctgtacagtggcggtcacatttcctttccggtcatcaggatagttggcaaaagttccgtccgggcgctgtttagcgcgaatgccttctgcaagctcagcgatcagttctttatcattgtctccaagagaagtgaggaggaggatcagaaaggcgtttgtcaaaatcggtccttcaaaacaaaatgaccatgagccgtccgcattttgcgtttctcttaatagggagatggttttcttttggcggcttctgacgttttcatgaattgtgctcacactcgctcaactccttcagaagcatatatattcatatgtaaaaggcggcatgacaaaagaaagaaactgctgacaggcagcagtttcctgtttgattaatcttccagattgatccagacgcttttcacttctgtataattattcagcgcgtaagagcccatttcccgcccgaggccggattgcttatagccgccgaaaggagatgccgcatcgaaaacattgtagcagttgacccaaacggtgccggcttggagacggtcagcaatgtaatgggcgtttttcacattctcagtccaaagtccggctgcaaggccgtattccgagcggttcgcccgctcaatgacttcatctaccgtatcatacggaatggcggctaaaacagggccgaaaatttcttcttttgcgatggtcatgctgtcatccacatccgcaaatacagtcggggagacaaaatacccttcttcaaacgggcagctgccgcccgcgacagctttggctccttccgcttttcctttttcaatatatgaaagcacgcgctcatgctgttcctgactgacgagcgggccgatttgtgtatcttggtgaaggccggcgccttgctgaagcgatttcgcatatgaaaccatttcgctgacgacctcatcatatttgtctttgtgaatgaagacacgggagcctgcgcagcatacctgcccctgattaaacatgaccccgtttaaagcgccgggaatggctttcttcaaattggcgtcaggcaaaatgatgttaggtgactttccgccaagctccagtgtcacgcgtttaattttttttgcggctttttccatgatttttttgccgatttctgtagagccggtaaaagcgagtttatcgacatcgtcatggttggtcagcgcttccccggccgtctcgccgaaccctggaacaatattgatgacgccgtcagggaagcccgcctgatctattaattccgctaaatagagggcggtcagcggtgtctgctcggccggtttcaaaacgattgtgcagcctgtggcaagggcggcgcccattttccacatcgccataaggagcgggaagttccaagggatgatctgccccacgacgccgacaggctcatggcgggtgtaattaaaatatgagccggcgaccggaatcgtttgtccggttatctttgtagaccatccggcataataacgcatatgctcaattgcaagcgggatatccccattcgtcgtttcattaatcggttttccgttatcaagtgtttcaagctgcgcgagttccgttttgtgctcttccattaaatcggcaagcttatacatcagcctgcttctggaagcggccggcatagtgcgccattcgccgtgatcaaaggctttgcgtgccgctttcactgcactgtcaatgtcttctgtctgtgcctcgtaaagcgtcatcagcgtttctccggttgccggattcggtgtgacaaatgttgatcctgaagcgctaggaacaaattttccgtcaatataaagtttcttcgtgccctgtaaaaatgtttccagcctttttgtgatctgcatcgttaaagaactcattcgtaacaaacctcccgaaatttttttatggtctgttttgagcatcttgatgtccgcgcaaagtaagcgcatacagtcattctataataacagccccggtaaaatcaattgataaccgttattgcaattcacaagaaaaaacggctacaataagcttatcgattaagaaaaggagttttataaatgattcataataattggcagacaaaagaaagcgtcaaaaaggtcaaatgcgtacatacagatgcgaaaaaatacattgtcaaaaatgtgctgacgccgggtaaagagtatgaagtcaaaaatgaaacagaagaattcatttttgttgtagacaatacaaacaaagtcggaggcttctacaaagagtattttgaagaagtttaaagctgaatgaatttattttgcctgagccatactaaaaaagactacatataaagggtggctgcaaaatgaaaaaaacagagcaagacaaacaaaataaaacatcagatcagcttcagcaagtgcaacctgaagaaggcaccgacacgacgatggaacaaatttcagatacctataaagaaggaacaattgaagatacggatcgttgatgttttgttgaaaccgcggcattggagaagccgcggttttttatggcgaagataaaaaactgacttttcgaaaaaaataccgttttcttgaaaccttttctttcgctgaaccgtactacttcataaaagcggcacctttcgcgaagggcttttttgatgaacgttctaaaaatgtaatctgttcgtaatggtttaaatgccgtctatgtcgtattcttatatagggataaagaacttatttttttatgattgtaataaaacaatagtatagaagcagaaagtggggttcttcattgggaattttttctgtcagcagatcaaccgacacaaaaaagctggaggctttgctcgttgagggagaacggatcgaaacgatttataaactgcgggttgaccaaatatgctttacgaataaacgagtgattttctttgataataaaatgttctccaaaaagaaagtgcgcgtatttcttccatataaaacaattgaaagcttcgccattcaagaagcggggatgtttgatcccgataccgggcttgtattaatgacaaggggaaaaactttcgaattggaatttgcaaaagaaacggacttgactgaggttcaagccatcttaacaaaatacttatgcagttaaatatcacataaaagccatccgaatgcatgcggatggcctttttattatataatgcttgtttttccggagttcgaatcaatgagatccggatcagcaatagaactgatggggatataaatcggcgccaaatcaccattttcttcaccgaatccgtagttgatcttattggataaaaaataatcgatttgctgatacgggccgatcgtaatggaagaaccgcggtcgactgcatttactttaaagcctcctacatttaccaaaaccggcgaaaacatcataatgggcctccttttccggcagggattttatcgcatgcagactcaaaggtagatggagaatcaatttgatcccggtcatccactttgccgttcgtgccgatgaagccgcttgcatctccgaagttctgtccgtatccctgattctttttatcagaattctgccattccgccagtaaattttgtccgacattcaccgctgaagcattttcaaaggaattaattttcaacatgaaaatattaatattgatatatggagttggttgaaccacaggcaaacctcctttaatacaggtgtatgccggctgttatgaccgtatgcttagacagggggcgataaaaatggatttcgataagatgaagcaatggatggaaatggcgcaaaacatgtccggcggcgacttttggaaaaacgtttttgatgatgaacaactgaaatcatttcaaaacggccattctcattttccctttcaacagggagatgggcaaatgagaagaaatgaggatgcttttcctcttatagatattgtggaaacccatgatgagctccaatttttactgtatctgcccggctaccggaaacaagatgttcagctgctgtcctacggagaatatatcgtcgtaaaaggcacgagaaaatccttttttaatgaacaggattttaaacagaagaccggaaaatacggcgattttgaaaaaaaactcgaccttccgcattccgctcagggaacaaagggaatgcaggcggtattcaaagacgggattttatatatatcgattgctaaacatctgggggatgcaagccagatcattatcgaaggctgatcttgtttgctgtgccatctatcagatctgaatcatcgatactcatgatagggatgacgacaacggtgcaatcaccgttttgttcaccgtacccttcatttcttttattggctactgtgtttctcaccataacggaagagccggtgttaaaagctgctccgccgctgattccgttcatttttatatactcaaaattgataacggatggaaaaaacatcatgattcgcctcctttttgtatatcatgtttatatattcgcaatgcgggacgcatagaactttccaagagtgacggggaaagaagtgattttctttgaaaaaaataatgaaagagattttcaaaaaagtgtgtgaagaagaattagaccggcttaagaaagtggaacaacagcttgatgagcttcaggataagtgtcattttgagccgcagacggttgaaggggaaaaaacatatgtccatattgagcacgtcaaagtggacaaggttgaatacaatattgattttgaaaagctgagtatagaagagctgagcggtatgctgaatatcggcgccacttaccatacaccggcgcacaggctcaaacaagcctgcgctgaagaatttcgggacgacccgcaaaatgatgctgcgaaagaaaaaagacagacaaagcagcagacacccaatgtcaccatcagggggagaaaccattgaccccgttgtttcagcctcctttttcgagggtatgtattaacagatgcagcgaagaacacagacgaaaaaggagatgatgaatatgtcattatcaaaagtacagcaggacagcctttatcataaattaatcgatttaaaggaaagtcttcagggagaatcaaaagaaaatcattcaatgagcgaagacacaggagaactgtcgaacggagtagataatcacttagctgatcacggaagcatttatttggacagggtcacgaatcaaacgctggacggtgtcgatcagaatcttttagatgaggtgaacgccgcgcttgaacgaatggataaaggaacatacgggatttgcgagaaaacgggaaaagaaattccttatgaaagacttgaagccgtgccgtacgccagaatgaccgtcgaagcgcagcgagaaacagaaggggatgtgaaaacagacgctccgtcatatgaaagggaatttcacgagcaggtgaaagacctctcaaataaagaaaccgttgatcaaaaaagctcacaaacttacgaaatcctggatcgcgagcaggattcacaataatagcagcaggtacattcatatgtacctgtttttttattccataaaaaatctcaaaatcgaaataaaatcattgactttatataaaaaagaaagtaacatactatttgtaagtaaatattaaaagattaccgggaggaatttagaatgtctcaagtattatttgtaaaatcaagtgaccgtacggctgaagaaggcgtatccgtaaaattatacgaagcgtttctggctgcttataaagaaaacaatccgaatgatgaagtgatcgaacttgatcttcataaagaaaaccttccttacctcggaagagatatgattaacggaacattcaaagcttcaaaaggaattgaaatgacagacgaagagaaaaaacaagcgtcaactgctgacatttacttaaatcaatttgtcaaagctgacaaagtcgtgtttgcattcccgctttggaacttcacagtgcctgctgtgcttcatacttatgttgattacctgtctcgtgcaggagttactttcacatacacgcctgaaggccctaaaggtctgatgggagataaaaaagtagcgctcttaaacgcacgcggcggcgtatattctgaaggaccgatggcatctcttgaaatgtcattaaacttcatgaaaaccgtcctcggtttctggggtgtccaagatcttcacactgttgtcgttgaaggccataatgctgcaccggataatgctcaagcgatcattgaaaaaggactgcaagaagcgaaagatctggctgcaaaattctaatttccattaactcttgcgcccctacagggtgtgagagttttttctattatagaagaaactggcggcagctttcgatctgatcttatattgatatattgatattttgtcgaaaaaacaatttttatgtagaataaagcatttttcacaaagaaaaaaggttttctgtaaaagaattaaccctcttgccaaaatacgactgatggtgtaggatataagagaagctacattgttcgtattgttaattaagttttaacctttaagctgtaatagggagttttatatcgaagccggaatgtcatgcctccattgcagaggacgacaggaacgcttctgcaaacacccactttgaggagtggtggtttaaaactttcttacttgcgtacggcatacgtagcgaaagccatttcccttgcggagatggctttttattttgaattgcccttgagcagcgtactttatcagtatgataaaatgaaagaatcaaagacaaagtgaggttttacaacatatgctggagaaagcccaatcccttctggcgcattattttggctacgacagtcttcgcgcgggccaaaagcaggcgatacaatcagttgcagaggaaagaaaaaacacggtctgcattatgccgacggggggcggaaaatcaatctgctatcagattcccgcactgctgtttgaaggaaccacaatcgttatttcccctcttatttccttaatgaaagatcaagtcgacgcgcttgaagaagcgggtatcgcggcagcttatattaacagcacccagacaagccgtgacattcatgagcgcctgaccggtttgaaacaaggggcttaccggctcttttacatcacaccggagcgtttgacttcttctgaattcattcacatcctgcagaatattacggttcctcttgtcgccattgacgaagctcactgtatatcgcaatggggacatgatttcaggccgagttaccggaatatcgaaatcctttttaatgaattaaaagaaccgcccgtcatcatcgcattaacggcgacggctacgcctgaggttcatgatgacatctgtaagcagcttcatattaagaaagaacaaactgtatataccggttttgccagagagaatttaacgtttaaagtagtaaagggcgaaaacaaagaccggtttatcgagcggtatctggaaaaaaataaacacgaagccggcattatatatacagcgacaagaaaagaaaccgaccgtttatatgagaaattaaaacgcagcggcatcaatgccggccgttatcacggcggattggcggatgatgacagaaaagaccagcaggagcggtttcttaacgatcagatacaagtgatggtagctacgtccgctttcggaatgggaatcgataagagcaacatcaggttcgttttacacgcgcagattccgaaagatatggagagctattaccaggaagccggacgggccgggcgcgacggtcttaacagcgagtgtgtgctcttattttcgccgcaggatattatggtgcagcgttttttaatagaccaatcggccgccggagaagaaaaacaaaagcaggatctcaaaaaactgagacagatggtggattactgccatacggaagattgcctgcagcggtttattctgaagtatttcggcgagaatgaggcggaagcttgcggagcatgcggcaattgcactgatacaaggaccgcccatgacgtcacaaaagaagcgcagatggtattgtcatgcatcatcagaatgaatgagcgcttcggaaaaacgatggtggcgcaggtgcttagcgggtctaaaaataaaaaagtgctggaaaacggcttcagcagcctgtccacttacggcattatgaagcatcaatccgcagcggaaatcagtgattttatcgaattccttatttcagatgaatatatcagaatggcggacggcacatttccgacgcttatggtcacccaaaaaggcagggacgttctgcttggaaaaagcgcagtctcgagaaaagaagccttacaggccgccgccgttaccgagaatgatgaattatttgagcttctccggcgtctccgcaaagagattgcagctgaacagggtgtgcctccatttgtcgtattctcagatcagacgttaaaagaaatgtcggcgaaacttccgaaaacggatcaggatcttctttccgtaaaaggggtcggggaacaaaaaagattgaaatacggagcagtttttttagaagaaatccgaaattatgtaagagaaacagagtgaaaaaaagtttttttagaaatttgcacattgtgtttttcattcgcgccggaaaaatcagaagcttgaaaacccttgctgtatcagggtttcagcaagacttaccaagcgagagaaatgtttcatgtaaaggaactgtaatctaattcaaatcgttttgttattgaactgacattttcatatgttacgatatcacctgttagccgccaataaaaagctaacaagggaggatttacttatgaagaagacgattatgtcctttgtcgcagttgcagcaatttcaacaactgcatttggagctcacgcttctgctaaagaaatcacggtgcaaaagggtgacacgctctgggggatctcgcaaaaaaacggagtgaacctaaaggacttaaaagaatggaatcagttatcttctgatttaatcattgaaggagagaaactgactatttcttcagtagaaacaaccacatctgggcagtacacagtgaagcagggcgacagcctctggaaaattgctcagaaattcggaacatcagtcggcaatctgaaaagcttgaataacttgcaatcagatataatttacgcaggcacaacgttaaatgtgaaaggtcaggctcaggctgcacagccggctcaagaagccagccagccgcaaactgaacaaaaaccagctgccgagacagaacagccgaaacaagaagctgtcaaaaacgagcagcctaaacaagaacctgttcaagaacaacaacctaaacaagaacctgttcaagaacaacaacctaaacaagaagcgaaggctgtcgaagcaaaacagcagcctgttcaatcaaatacaaaccaacaagagcctaaaaagcagctgacaatgactgcaactgcttactctgctaacgacggcggcatttccggtgtaacggcaaccggtgttgacttaaacaaaaaccctgatgcaaaagtcatcgcggtagaccctagtgtcattccgcttggctctaaggtttatgttgaaggttacggagtggcaacagcagcagatacaggcggcgcaattaaaggaaataaaattgacgtatttgttgcaaagaaaagtgacgctaacaactggggcgtcagaacagtaaatgttaaagtattagactagtttcatatagagatgaagaacacaaggcgaaatgctttgtgttctttttttcttcccttttttgactgtatataatcgttatatgcggaaaaagaaaaagcgtttctctaatataataaggaatggatgtgaaaacggaatctgaagggatgtatgaatctaatggagccggaatttatatgtttatggaatgccttcacagaatcaccggtgtttcatgcaggtatatgcaccgctttcgccattgtgctcgttatcggactgtctatgcctgctgtcaggctgtttcaggcgcttgacagagggagaggaaggccagccgttattgaaaaggtgagacgtactggcgtgatgaagaatggcaggcacgagcttgtgcttattttaaacgtaaaaaaccaagacggaacgcatgataaacgtgaactgacacatgccgtatataatgaagagatcagccgtttttatgaaggagcttccgtatgggtgacggcagcggctggcggacgaattatgatcgctccgcgcacgccgcggcataaggcgtcaaaataaaaagacggggcggttttcccggctttatgtattaatgccgatcgatccatatccgtccgccttctgagccggcttctatcctgcatgttcctccgatcgggaatgtcatcaaaggggaggtatggccgaaatcagcatttgcgataacaggcatggatgacagttcttcttttgtacggatgacggcacgcagagcctcctcagacacatttgaagcatgctggaaacgtccgatgacaattcccttcacggctgaaaaagcgggaaggtggatgagtgactgcaaatcccggtcaaacatatgaatgtccgacatataatcatcttctataaacagaatcacttgctccatctccggaaagtattcggtgccctgcagaagattcagcgtgcatagatttcctccgatcagtgttccttccgcatatccgggttgaataacgagcggtcccggattccgataaaaacgtctgtcctcctggttcaaataccatttatcatcactccactcggatgaaggctttacctcatacgggttgtcagaagcacagcaggccaagaaagagtcaatcgtatagtccagcccttttttcatggcaaatgaagaaaaatggggaccggaatatgtaataaggccggttttttgatatatggcatggccgagagcggtaatatctgaatagccgcaaaggattttcggatgccgcttgatgttttcataatcaagatagcggagcagctgatttgattggaacccgccgagtgtcgtcaaaatcgctttgatgtcagggtcagcgaaagcctcgtgcagatcccgtatacgcgattcaatggatgatgaatcaaattcatttatttctttcgcattctctgaaaaagagacacaaaagcccagctcctccaattttgtcttcgcggcatttatattttcatctgacataacggacatgcttgtggccggagacacaatacgaatgccgtcaccttttttcaatttttccggatacaaaaaaaccctccttaaatggtttaatctattacaccatattaacgagggtttatctatcattttttacaggtcgacccatttaatgccgcctgattgcgtatcattgtcaatccagacatcaaagtgatgcttttcataaaaatgaacgagtctgtcgacatgatcccaatcacgcttagcgatgtcgcctgtcactttcgggatattctgctctctggcgatatgttttaaaaatttcatgcagatcgagccgtagccatggttcggcgggcctttaatgtccccgatatgaatggcattgtcataataagaggcgatcagtgaaaaacagcctcttcccctgtaggctgattcacaatcagtcagcataatcttacatgtttggccatcatcaatcgaggaaacaatgatccaatcgtcattgttcgattgatcaataccaagcactcgcgcgtcttttgatacatctatcagattttcccgcattctgaaaatctgaaattcaagtttatgaagctctttttccagctctttctgatctctttcttctgcagtaaacaaaatcatactcctttcacagcgtaaaagtcttagttaaacacaagtatccattgtagtaaatgatgtcttggtttgtaaatgggttttgcaaaaacttttttagaaaagtctgccgtttatatgtggattgacgtttttaaggcggtgcggatagggaaaggaacagtgagcagcggaaaaaggaggaatctataatggcaattgactcactcatcggcaaattgaagtacgtaatgacggaatctcctgataaaatgctttccttatatgtaaatacggatatgagaaatccggatcagcaggggggagagtggaaaatcgccttgaaaaccggttttcggagattaaaagagtatctgtctgccagtgatccggaagaagaaaaatctctcgtccgcatcatggaacgtgtctatcaatatatcgatgagcttggtaaagagatgccgcgaagtctcgtattttttgcgtcgggagaaggcggtatttgggagacgattgaattgcaggtgcctgttgaaacacgattttattgggaagagacggctgtccttgatcaattagaacttcttcgtgaacaatttccgagcacggcttttattctcacccagcagaatgaagtgaagatcatagaaaccgtactcggaaaaattgaaggagtggagcattatcattacgacgtcatcaatgaatcgtggaaaccgcaggatgtaagcggaagcctctccgcgtcgatggacgaagacgctgccaaagcccacgtcgaagaaaaccaaaacaggctgtataaacgattggcttcaaaccttgatcaaaaggccgcttcacaccaatgggagcgtctcgtaatcgcaggggacaaagaaacagccgatattctcgatcagcacatgaataaaccgattgatcggatcattccaaaaaatctgttgaatgaaaacgaacataaggtgatagaagaactgttgaaggaagcatgatatgacgaaaggccgggtctcaaacacccggtctttttagggcttaagtttgtctaatttctgacgaagcgggcgaaaccgttgacatcaaagctgaattctcataccatttggatagtcagtaaaattgagagaggtcataagatgaatcagacagaaaacaaacctaaaagttataccggtatcgtgctgacattgaccgttctgatcaacgggttaattgcggtgctgttttttatgccgaaatcgggacaggtcagcattgccaatattcatattctgccgatgttaaatgccatttttaacagctttacttttatctttttgctggcagcgctctttatgattaagcaaaaaaatattcaagcgcataaacgctttattttggcggcgtttacgacgactctgctgtttttgatctgctatgtcgtataccactctgtggctgaaaatactttattcggcggccacggcatcattcgggggatttatttctttattttaattacgcacatctgtctttccgccgttatcgtgccgcttgcgctgtttacgctgatcagaggattcagcatgcaagtggagcgccacaaaaaaatcgcgagatggacgatgccgctctggctgtatgtcagtctgacgggtgtcattgtatacttaatgatctcaccgtattattaaaaaaagccgtgctctgcgcggcttttttctattgattgaaaaaggcgcctcatcagggcgccttttactcttcaagcgtttcaagtgttgttacatttaaggattgttcaacggtttttgtttttgcttttactttttctgcgtacgtgtaatcaccatagcagtagggataacggaaattgtctttgttccctccgcaagtgtaaagtttcggattctttttgacctgctgctcggagtattgttttgccagttcctcagtatgcgatcctccatgttcagccacaaaatcaatatagccggctcccatgttgtagctttgtataatcgtatccaagtctacgccttttttcttgcctgtttggtacatgagagtgaattgtttgattccctgtttgatactggtttgagggtttttaatctcatttcgctttaaacccagagattctgaagactgcatgggatcatttcctcttccttttgactcctgatatatcatgccgagtacaagcgatgtatatttggtgagtcctttttcatccagctcgtcttcaacaagcggtttgtaatctgtcagccgttcaaggacgatcggcttgacatcaaacggaagacttttgagccattcattatttgaaaataacagaatgaggaagaaggaaaccatgacaaaaacacatatcatcataagacccgcggcagcgaaacagccttttttctttttctccactgtgtttcaccctcaatttcaggagcattatgactttttcattatgacacagatgaatgcgcgaaaccaagcggaaacccgtatttgaaacataaatttaaaataacggttcttttgtcaggcgcaggatgtatctgcatcaattgacatttggtataattgggctacttgagaaaagaagggtgaggtatatgactgaatttcacgaatccggaaacaaaaatgaccccgctgtcgatttagatgaggaaactttatttttggttgcccagacttttaaggcgctgtctgatccgaccagaatcagaattctccatttgctgtcacagggtgagcacgcggtaaatgatatcgcagaaaagctgaatttgctgcagtctaccgtttctcatcagctgcgttttcttaaaaatctgcgcctcgtcaaatcacgcagagaaggaacatccatctattattctcctgaggatgaacatgtgttagatgtgcttcagcaaatgattcaccatacgcggcacgattaaaaaacatccctgcttttgagacagggatgtcagccgtactgactgttattggtttggtctctgctcgtttttaaaacataaaaagagaagccgctgtaataaactgcgatgaaataaaagatactgatggtcagcggatcggccccgaccgtttggctgtatgcctccggatgggtaaagtccgctgtgacccggtaaatttcaataacgcgataaacaaatctcgataggaataacgttaatagaataagttcaatccacaggtgagtgcgaaaatatatttttccgcggcgttcttcaaaagaaatgttccgtttagcaaacaggaccagaagccagccgcaaaaagtgccgaatataagatggccgtataaagccgggtgtgtgatgctgaaaaacgccagagctgcggccagcaatgaaaacaaaatcattcttgtataaagccagcggggtttcaaaggctgaaagccgacggaccgtttcacctttttatacagaaaaaaggcaatcattaagacagggcagatgctttgaagtgtgatatgcatggtgtggaactccccctccgttgagtagtgtatgcttatccggctggttttagtagtgtgatttattcgcaggctgaaagcatcttttatcacattatgcacgtttctttttttggcataagagaatcgcccgcgcctttttcaggatttaaacataaaactcttgaaaaactaacggtattaggtataataaaactaatgatattagttttaggaggatgttcatgagaatcttacaatacggaaccgtttggcagctgactttttttccagcgcttttcccggtgaattgttatttggttgaagaagaagaaggagtaaccctgattgacgccggactgcctaacagtcataaaggaatcaaacaagcattgcggcagcttgggaagccgctgaatgacatattactcacccacgcgcacggggatcacatcggttcgcttgactcattagctgcggaatttccggatgcttccgtctgtatttctgagcgggattctttcttgctgaaaggtgacacttcattatttgagcatgaagcacaaacaccgataaaggggggagtgccgaaaaatgttcagaccgaacctgatcgcctgctgaaaggcggcgagcggatcggatctttacttgtcattcccgctcccggtcatacgccgggaagcctcgcttttaaagatatgagaaatgatatgctgatcgtcggagatgcctttcaagtacggggcggccttgctgtttctgggaagctgaaatggaaatttccgtttccggcttttgctacgtggaataaagaagaagctgtaaaaacagcaagaacacttatcgctcatcaaccaagcagtctggccgccggacatggaaatgttctctgcaatcccgttgaaatgatggctgaggctgctgaggaagccgaacgaagcctgccgggaggccgatcataatgtcaccgagagtcggaatgagccttgacatgatattgagagccgcagcaggcatcgctgacgaaaaagggctgaacgaagtgacgcttgcggctgttgcaaagtccttaaacgtaaaaccgccttccctttacaattttgtcaatggccttcaaggaattaaaacagagctggctgtctccggtttaactatgttatatgaaaaaatggcggcctctgcagaaggactgacgggcgaaacggctttgcttgctcttgccgatgcctatatcaatttcgccgaagccaatcccggattatatgacgcaacatttcaaaagataaaagacgggcggattgagaatctgtcaagcctgcttgtagagcttgttgtcaggcagctgactgctaacggttatgcacagtctgacactgcgattcatgctgcgagaggactgaggagccttcttcacggatttgccgtgttgagaaaacagagtgcatttgaattaaccgaatcaattaaggaaagccggaagtttgcagttgttgcttttctaagaggtttgcaggagagggaacaataatattattatgtaaactaaataaaaagacgcatcatgtaaaaaggagggacaaatggattcattacaacatatcatttgtgagcggcgcacctattcacatatatttgattctcatgcacacacatactgccaaatgctctttccgctcgaaggacagctggacctggagacagaaagacgtaaaatcagattaaaacctgatcaaatgctgtatattccgcccgggcatgaacatcggttccgttctttggagcgaaatgaatgtctcgttctcgacataccggcatattttttcaaaggttcattagaccccggcgttctgaataagcttgatcctttttggacatcgattcggtttctgctgacagaagagacaaagcagcagtcggctcattcattgagtctgcttgcagaatatattgctgaaaagatacaagtaaaccgtacgaatgattcaattgcgtatatccgccgaaatctatcaaagacttttacaattaaagagcttgccgcaatggaacattaccacccggcgtattattccgactggtttaaaaagcagacggggaaaagcccgcaagcttatattgctgagctccgtatgaagaaagcggaacaaatgcttattgaaacaaaatgccggctgacagacatcagtcaggaggtcggctttcaaaatttgtcttcctttaccagatggtttgtcagacataagggaataacgccgcgcgtcttccgaaacacctttcaatctgataaataatcctgaaaatcggttaaataaactgcttctttttttggtatcatgattgtaaaaaaggagtttttgatatggcagtcatcgaagattttatcaagcttgatcttagaataggaacggtcgtaaaagcggaagtattcccggaagcaaaggtgccggccattaagatgacaatagatttcggcgaaaagatcggcatgaaacaatcaagcgcccagattacaaaacggtacgaaccgggtgatctgatgggcagacaggttacagctattgtcaactttccgccgcggcggatcgccggatttaagtcagaagttctcgttctcggcggcatcccggaaaaaggagacgttgtcctgcttacgccagagcagacagtaccgaacggaacgaaaatcggataataaaaaaagacgtttgcagaagcaaacgtcttttgcgtattgaggcgatacaccacacgccacattcgtgtgtgccgcaagggcatgtgcatcggcttacacaattcagctcatcgctatatcaatatagcatgccgggtgtggaaatgcaagagattttttaatatatgttatatctggctttgttttaccgatcccagattccttcgtgtaaggtttaatttgaaattttatgatcttgaataaagcagttcgacaaatgcaagagattcatctaatcttatatcctatggtaaaatttagacagaaagaagcagaaaggagccgtaaatgaaagtatttgaagcagcctcgttcatttcagccgcagaaaagcgggcaaaacaatacgatcagattagagaacaatttatcaatctcagaaaagcatttcagggaatggctgatttagatgacagtgagttttcaggcaaaggcgccgacaacattaaagcattctttcaagatcacgccggtgtcacagacagctggcttgatctgatcgatatgaagattgcgtttcttaacagtatttctggaaaagtatctgatgccggattggccgattcgtttgtggaagagtcatttttagaacacgagctgattcatgcgaagaataaatcacaagccatcatgcaggagcagcgcaatgaactcaaggacatcataaatgaaatcagcgatatcattcatcttgatgttttctctacagaagatgtcgatcaaaatctggaatcagcagacaaaaaacgggacgataccgtaaataggctcggcaagcttgatcacgatctaacaaaagaatacgccgaaacagaagcgaacgaacagttcatccaggccgactttcagcagctccaaaatgccacgggcaaaggaaaaaacgccactccgcttcactataacgccaaggcgtacagggaaagtgacatacataagaaaaaaggcgagattgcaagacattcagacacatatttaacgtttaagaaggaagaagcaaaagagcgggaaatcaaggatctgaagaaaaagctcgctgacggtgtgaccgatccggatgaatacttggaaattgcgaagaagatcggctatgaaaaccttgaaccttcccagcagcaatatgtcattcagcttgaacaagcaaaacagcttgaagaagccggagaagtgacttgggatattttaaaaggagccggcgttggtttatatgatgtcgggaaagacacggttagcgggttatgggacttcataaccgatccgggagaaaccttgtcagcactggggaatgcagtacttcatccagtaaaaacatatgatgctgtttcagcagcaatcgaggaatcgtatcaaaaagatatggtgaacggagatgcttactccagatcaagatgggtgacatatgcaattggttcagcagctgtggctgtcgtcggaacgaaaggcgcaggagccgttaacaaagctgatgcggcggggaaagtcataaacagggcaggacaggcagggaagaaaattaaagacgttaaacttccagaactgcttccttataactctaaatatgatcttgctctgtcgggtgacgtaccatacaatgtggttgacagccaaaaccttaaaaatgaacttttgaccaatgcaaagaaaatcccggatggaacgagaaagccgtttactggtcaagaaataaaccttccttggttaaataaagaaaagtatggtgcctttgaggttaagggcaaggtaaaagcaaagggaaaagttaaagacataagccgcagagtgtatactatgaaagatattgatatgaaccaaaaaaatcgtaaaggccttacgaatcttcaattaatgaaaagtggaaatgcaccttttgcgaaagatgggacacaaataaatctacaccatttaattcaagaggaacctggtccaatgcttgaaattccaaatagcttacatactaaatatagcggcattatccataggcttaaatctgatggtgaaagctttagaaacgatccggttttaaaagcccagtatgataatttccgagacaggtattggaaatggagagcaaaacaatatgaaaaataaaaaaggaatgagagatatcaatggacttatatgaaaaaactatagagtttataactgaaaataaagcagacagttattttactagaggaataagtgaaaaagagattattaatatagagaaggagctccaactacaacttcctgatagttataaatggtttctgagaaactttggctctggcggcttatatggaattgatattttagggtatgactttggcggggcttcggtagttgaaaccacagaggaatatcgtaattattatcatttatctgatggacttgtgatattagaagatattgatttttttgcttatgccttagatactaataaaatgaacagtaataatgaatgccctgtttttatttgggatagagtacttggataccaagacaagctagccgacagctttattgaatttttctacagaaggttgcttgaaaaaaaagaaaactgggaagaagatgaagactgggacgattaataaaagaaagctctctattagagagcctttttcagattttcaatttttaacaggctttataatgagcaaacaggcattactcaaaatactcgccgcgcctatccaaagcagccattgtgttgcggtcagccatgaggcagttaggataaagagtccaatggcaattgatatataattgccggctcggtccagtttatgtttgcaatgaattttatatttggcatgagaaataaattgatcaattttatctttcagctcatagcatttttccttcatcttatcctctgtttcttttacttttcgataaagcatattattcatcgtctgcactcccatatcgccgttttgaaaattcagccatgattttttcttcatagtcatctgagatgaattgtgcctgatcttcaactttcaaatgtgctttttcttcaaaaccatcctgttcttcaccatcaaaacgataaagtttttgcaatagcctccagaatgtttcaatttcatcagttgtgaagtcatgaaacatatccgctaaaaaataggtggatttttctgaacaggaaattaacgctttttttccttcagcggtaatctcaatattgattgcacgtttatccagtttgcttggcacagtgtgaacatatccttttttcgcgaggcttgaaattaatttgttagcggtttgttttgttgtgcccagctttttagcgatattcataagtgtggtatcttccgtcggtaaatgggcaatagcaataagagtcatgtgctgtcgggaagtcaacatttctaagtattcgtccccccgagcctgcactttattgacaaccgaaaataatgatgcgtaactttgttgcataacatgcagttccttcattagtaatttaatatccataagttatctcccatctaagatgtcaccatgttgacagttacaatatacatcacaaaaggaaattagtcaacatggcgactaatagtggcaggtgcggctgttttcaaaaatgtcacaggcagtcggagtgtttacaaaaggggaaataagtataataaatgcgaaaagggcattaatccaaagtgagaaggtgtttgacatgcagaaagtgaactggtcagaacagtatgaatggttcaataaacaagatgaaaaagacgggcgtttaatggcgctccttcgtcatgagcttacatatgaggaagtcatacggttatatatgaaagggttttatttgaaatcaaaagaaggggatgtttcgttaagtaagaacgatatccatcgtatgtttggggttgaagagagaaagggcggcacatcttgatgaacgggaagagaaaaacccttcccgcttttcatggaagctgttattctttttccagcatggaagtcagccattctcttaacgcagttttctgtacataccgctttccgtttctcgtgatatgcggaatgtcggaggtgtcgggcacgatttgtttcgcttcttccttggtaactcctaaataataaccgatatagaagtgcagatctttttctttaatgagaatgtggtcagtgtgttcatgaggatcaggtgatttaaaatttttcaatccgtctccgatgaaatatccggctaaagcgattccgatgccggtaatgatatccatacagcaaacctccaataaacgttatcactttttatacggtgaagccggccgaaaggattcagccttcatcaaaaccgctcggcgtttattgcggacggttttaattgctgagcttttccacctgcacctttccggagaagaaaacagcgcctcctcccatatccgccagccgatcgggcgtgagcgaattgacgagctgttttttatcatccatatcggcccaaagaccttggctgactgcaacgccgggaagcacctgttcgccgaccgaagctgttaattcacactcgccgcggtgattccaaactctaacggtttccccgtcttctatgttccggcgtacagcatcctctgtatgaataaaaagctttggcgctttttctaattttacgtgtttttcattattcgaaaatgttgaatttaaaaaattatgattcggtcccgggacaaataaaagcggaaaatcaccatcgctctcaagagggatatgtgtcggcagcgcgggataaccgtcttgtttcatcttttccgaatataattcaatttttccgctcggtgtcttgagctgtcccggaaaaagcggttttttccgtttggctttcatgaaggaatggcgtgagagcgcttcgtaatcaatatcctcgatatacggattgtcgggaaagtccagcgcctgtctgatcaattcttcatcggtatcctgaagctcctgctcggtaaatcccattgctccggcaagcaaacggaacacttccgtattcgatttgctgtccccgcagggttcgatcaccggtttttgcagctgaataaaatgatgccagtaagacgtgtaaaaatccgtgttttccaaagcggatgcagcagggagcacgatatccgcgtatttggcggtttccgttaaaaacagatcgtgaacgactgtaaataaatcctcccgcagcaggccttttctgactttattcgcttccggcgcaaccactgcgggattcgtaccgtaaataaacagggagcgcacgggcggttttgtttctaaaagaacgcttccgagcctgttcatattaaatgatcgtggcttcctgccgtaaagcagatcaggccgctggagcgcttgtctgttatagtttaataccgcgctgttgtgcttgattgcgcctcctccggtgttgagccactgtcctgtaacagccggaaggcaggcaacggtgcggacgatcattccgccattgtcatggtgctgaatgccgtttccgatcctgataagggaaggggaggtttccccgtacattctcgcaaggcgtctgatatcgtcggctttaacgcctgtaatagcagaaaccgtttccggatcatagtgtttaacatgcgcttttaattcgtcactgccttcggtgtattctgtgagaaatgcttcatcgtgaaggttttcgtcgaataagacatgcatgataccgagggcgagtgcggcatctgtgccggggcgaatgggaataaaccaatcggcaagccggccggtttggttcttatgtacatcgataacgacaattttagccccttttttccgggctttttgagcaatcatgacttggtgcatattcgtgctgacggcattgatcccccaaaaaataaagagctttgcatgtatggtctcctccggatcagtacccgctccttctcccattgtatagttatagccttcagaaccggctttgctgcagatcgtccgttcgagatgactcgctccgagacgatggaaaaaacggcggtccattccctctgccgccagttttcccatattgccgtaaaagctgtacggaagaatgctttccgctccttcttcggcaataagctctttccagcgcgcactgatcgtattgatcgcttcctcccaggaaataggcgcaaacgcggcttcaccttttttaccgatccgttttaacggaacggttacgcgcttttcatcataaatgcgctcagccatgtgtctgactttgttgcaaatattccctgatgtgaccgggtgatcggggtctccctgaatgttaacgatttttccgtctttttttgtcacaagcaagccgcattgatcgggacagtctagtgagcataccgacttaaagaccccgttcggctgtgttgcagcagaattcatagcccatttctcctctttgtttatattgtaagcattataacatttcaaaatcgaacgtcaattcagaaaaaaagtgttgacatcacggaaagacttttctatgatgagtttattcttttaaacagcctgacaatttcatcattttattttctatccagagaggtggagggactggccctacgaaacctcggcaacatttattgtgccaattccagcaagcgtatgcttgaaagataggaaagaatgatctatacatatttgtgcgcttcaagcgcataaagacggtatatgaatctctttccttctttggggaaagagatttttttatgacaaaatttatgtgaaaaggatgttttgcaccatgacggttttaattaccgcaccatatcacgacgaggggctgaaggagctgactgagctgttcggccggactgtgcaccggccgtggaagaagcacggccgggcctatcgggaagatgaattgatccgaatgattcaagagacaaacgcgtcggggcttatcactgaacttgatgaggtgtctgagcgtgttattgacatattgcctgattccgcttttatcggtgtctgcagaggaatgccgtctaacgtgaatattgcggcggcgactaaaagaaaaatccccgttttctttacaccggcccgcaatgcccaggccgttgctgaaatgtttatcggaaatgtgatttcatttttgcgtcatacgtattcttcccatcagtggctgaaggacgggaagtggaatggtgattatttgcaggcttatgtcaaattcagaggaaatgagctgacggggaaaacagtcggccttatcggtttcggagctgtcggacagagaatcgcccggttattggccgcttttgactgcaaggtgctttactatgacccatttgtccgtcatgaaaaccgggagtatgaaaaaacgacgattgaacgggtattttctgaaagtgatattgtttccgttcacttgccgcgcacagaagaaaccatcggccttatcggcgcccggcactttcaattgatgaaacaggaagctgtttttgtcaatacgtcaagagcggcggttacagacagggaagagctgctgcgggtgctgaaagaacggcggattaagggagcgatccttgacgtgttttatcacgaaccgccagaatcttctgattatgaattgatctctttgcctaatgtattagcgactccccatttagcgggcgcaacatttgaagtggaagatcatcatgtgaagattttaaatgaagcgcttttcaaatggaaacaagatcaaacctgctcaatacgtgaactttataacaaaagagaacttgaaacggaaggaggaggctgtaatggctgaacaaaaaggctaccttgtatttgacatcgggacggggaatgcgcgagtcgcggtcgtgactgccggcggcgaagtgaccgcgcttgaaagggaagacattgaatatgtgacggatccgctttatccggacggacgatatttctcaccggaaagattatggacgcaaatcagcgctatggcaaggaaggttattgccaaaagcccacatattacattaatcggaatcacctccacaagccagaggcagggaattgttctgatcaataaaggtaaaaaggcatttctcggtctgcccaacattgataacagaggccgtgaatgggaagacgggattgagacaaaagaagaagtgcatcagcaaaccggacgtcttccgagcgctttattttccgccatgaaacttgtcggattaaaagctagacagccgtctttatggaaagaagtgaagtacatcacaagcatcagtgactgggtgacatttgagctgagcggtattttaagctatgaaccgtcacaggctgctgaaacactgctgtttgacgtaaggaaaaaggcatggtcagagaaattatgcaacatcttcggtgtgccttctgccattcttccttcactcgtccgatctgggacggttgtcggaatgttaacgtttaagaaagcggcggttctcggtctatctgaaagagtgcctgtgattgcaggcgggggagacacacagcttgccatcaaaagtgcagatgcaaagccgggagatatcgtcatcgtatccggcacgacgacgccgattacaaagataacagcggagaccggaaccgaaagtttaacgaatgcatggctgaattgccatacagaagaaggtcaatggcttcttgaaacgaatccgggtgtaacaggactcaattatcaaaaattaaaatccattttttatccgaatgaatcctacggcgttatggaacgggaaatcgcaagtctgccgaaacatgatcatgcttgtatttctgcgttaggctcctatttatcgcctgagaaaaacgcactggcaaaaggcggatttatttttgacgctccgctgtcccaaaacttaagcagagcccattttgtcaaagccgcactgctggaaatcgctttttcaatcaaatggaactatgaggcgttaatagaggtggcttccttttcacaagatgatgtgaaggtgtgcggcggcggtttccaaagtgatgctttgacgcagtttcttgctaaccttctccaaaagaaaatctataagagagaggggttcagccaggcatccgcaatgggagcggcgatgatttgcaacgaagctctcggtgtgaaagcagagctttcgagccgcacaaaggtaattgagccggaagcggatcagacggatctcttcctatatgaagaatggaaacatacgcaaaaattatttactcattttcagccggcggtgaaagcctgacttggggatgagatgacaacatgaaagattgctgaggaggaacaaaaatgcttaataaaataggaattccaaaacagctcgcatggggatttttgggagtcgtgctgtttatgatgggggacggccttgaacaaggctggctcagcccgtttttagttgaaaacggcttgacggtacagcaatcagcatccctgtttacagtttacggtatttctctcgctgtggcgtcttggttttcaggggtctgcctcgaagccttcggcgcaaagcggacgatgtttatggggctgttgttttacgttatcggaacagccgcatttatcgcatacggatttgaaaatcttaatttgccggtgatgtatgtcacgtattttattaaagggctgggttatccgctgtttgcctattcttttttgacatgggtgatttaccggtcgccgaaaaacaggctcagtacggcggtcggctggttctggattgcatattgctgcgggatgtttgtattcggtgcttggtattcaagctgggccatcaaatccttcggctatttgaatacactgtggagttcaattttctgggtctgcctcggcgcgttttttgctttgattttaaatagggaccgctttgaaaagaaaaaggcagataagcgggaaaaggcgcaggaattaatgaagggaatcaccatccttgctgaaaatccgcgcgtgctctctggggggatcattcggatcattaacagcatcggtacatacggatttccggtatttcttccgatgcatatggcgcagcacggcatttctacaaatgtatggcttcaaatttggggaacgatctttctcggaaatatcgtctttaacttgatcttcggcgcagtcggcgatgccttcggctggaaaaagactgtcatgtggttcgggggagtgggctgcggcatttttactcttttattatattatgctcctgttgtatcacatgggaacttgcttttcgtcagcattgtcggttttatatggggagggctcctcgccgggttcgttccgatcggggctatcgtgccgacggcggccggcagcgataaaggtgctgccatgtctgtgttaaatctggctgcgggcctgtcggcatttgtcggccccgcgcttgcctgggcgttcatcggacttgtcggcgcacaaggcgttgtatggattttcgcagcgctctatttcgtaagtgcaatcttgacaaatcaaatcaaaatacctgaagagaaaacggcaaaacacaataaagcattgcctgaatacgcttcttaacagcagcgccccgaaaattcggggcgtttttttacagctgctgaagaaacccggcaaagcgctgaatttgttcacgtaacgattgtttgttttcgtgaaattgtttgaaacgatgtccgtttgctccggacggatgcgggaagccttccagaatgaccgcatgacccattctgccgttcttcttcagcatgcggcaggctgattctgctgctttgccgagagggataagcagaatgtcctttttcatcatttctatttcatccggaaaacatgtcagcgcgtaacggctgagaagagctgacctgctgattgccggccgatgtcccgtatagtttttctgtttataaaaaacagggtgtttgataacggacgttgtatgaagcagctcccgttttgaatcaaataaccgggatgaatcctcaacgtgaagcgcggccggcagaccgcattcattaagcatttcgatgatgttctgcctcattgaaccggaaagtccggccgctttttttgtttcataggctatcgtttcaaaagtttcgccatcttttaaaagctgtgccgcttttttgtaagccagctgcatttgaaaaaaaccgggtgtgattccggaaatggcaacgactgcataagggttaatatattcattatgaggcgaataatacaaatccagatctccgtccttagctaaatggaaagccggagtcagcaaatccgattttgtaaaccctcccgaagaagatagtgctttaagctgctgcaaaaaatgcgcaagccgctcacgatcgcaaatcatgttatgcctccttggatccgcgccagtttctcttagtgtcatcaaaaacgtcggatgacatgcaggctcataaaccgcttttaccggcgttccagagcattttcagcacgtgaggcgttcctttaacttcggctgccgtcgtttgcacggctgtttttttagtaagaaagtcttcctgcagttctttctgcttttgtgataacaaacgggtttctgttttgatttcatcaacggacgtctgcatggacgctgtcacggcgttaatcttctttatatcaggcgctgtgtttcttttaaaatggacggcggatacggctgcataaattaatgcggcagccgcaacggcagcactgatatacaaaatgatgatcatctgcttttcactcctttttttcagttgataccctttacggatcgtgttgaatcattttatttgctaattgttttttttctgcttataatgtgaaatcgtacataaggacattcagaaagggtgaaagacgtggaaagtttacaaaacaaaacggctcttatcacgggtgcgggcagaggaatcggccgcgccgccgctatcgctttagccaaagaaggagtcaatatcggtttaatcggccgcacagaagcaaatgtcgaaaaggttgcggaagaagtgaaagcccttggtgtaaaggcatcattcgctgctgccgatgtaaaaaaccaaaaagaggtagagcaagccgtctcctctattaaagaagaactcggtgagattgacatcttgattaacaatgctggaatcagcaaattcggcggatttttggatcttacgcctgaagagtgggaagacatcattcaagtgaatgtaatgggtgtataccacgtgacacgcgccgttctacctgaaatgattgagagaaaatcaggagatatcattaatatttcttctacggcgggccaaagaggcgccgcggcgacaagtgcgtacagcgcttctaaatttgccgttctcggtctgactgaatctctcatgcaggaagtcagaaaacacaatatccgtgtcagcgcaatgactccgagcacggttgccagcgacatgtctattgaattaaatctgacagacggcaatccggaaaaagtcatgcagcctgaggatcttgcagaatatatggttgctcaattgaaattacatccgcgcattttcatcaaaactgccggtttgtggtcaactaatccttaaacaaaaggggacctgtcttcgtgacgggtctttttttgtttccgcaacccgaataaatgggcataaagatccgtttttgcagaaaaaagagtgaaaaagaaaccgatatcagctataattaaactaaataaactatgtaccaaatgttcactaaaattatttttcctcgcctccaaaaaacaaatcaatacaaaccaaactgtccgaacaataaaagggaaaacgggatataaagagaatatttagtacatggaataatttgttagaaggaagggtgtgcacatattgaaagaagaaaaaagaagttcaaccggttttttagtgaaacaaagagcttttttaaagctttacatgattacaatgacagagcaggaacggctttacggactgaagcttctcgaggtgctgcgttcggaatttaaacccatcggttttaagccgaatcataccgaggtgtaccgttcacttcacgaactattggatgacgggattttaaagcaagtaaaagtgaaaaaagagggagccaaactccaggaagtcgttctctatcaatttaaagactatgaagctgcgaagctttacaaaaaacagctgaagacagagcttgaccgctgcaaaaagctgatagaaaaagccatttcagataatttttaaatccggccggaacgcccccggcctcccgggctcaaaaggtttgttctgtgattcattatacataatagcaggctcggaacaatacatatcaataataccttcaaacttgacatcaactcctgaagtggtaacataaaaaacgtgtgaaaaatacgaacaaaatacgaacaagggagatgttaccgatcttagatcaaaagaaagttgcttttatcggagcaggatcaatggctgaaggaatgatatcaggcatggtccgcgcaaaaaaaattcccaaccaaaacatctgcgtgacaaaccgccgcaatacagagcgactcgctgaattggaacatcaatacggtattcagggcattgcttttgacagcatgaaaaccgaagatattgatgtctttattttagccatgaagccgaaggatgctgaaatcgctctggctgcgctgaaacggcgtattcaacctcatcaaatcatcctgtctgttctggcaggcataacaacctcatttatacaacagtcattacatgataatcagccggttgtaagagtgatgccgaacacatccagcatgatcggcgaatcggcaacagctgcggctttcggagaccatgtctcttacggttcagcaaaaaccgcggtatcccttttggaatgcctcggggaagtgtacgtgatcaaggaagatcagatggacattttcaccggcatcgcaggcagcggaccggcgtacttttattatttaatggagtttattgaaaaagcaggtgaagaagccggcttagacaaacggctgtcccgcaaaatcggcgcgcaaacgttattgggcgccgctaaaatgctgatggaaacgggtgaaaaaccggatgtgcttcgggaaaacatcacctctccaaacggcacgacggaagccggcctcgatgcgctcaggtcagaaggcggcggagaagccattgccaaagccatcaaacacgcgaccgaacgttctattgagatcagcaaaacaattgaaaaaacggcagcactataatcgttaaaaaacaggagtgatacagtgacgtctcggacgaagatcaaaagagtcgcggtgaaaatcggcagcagctcactgacgagcctgcacggggaaatcagcagaagaaagctggaagcattggtggatcaaatcgcacagctgaaagacagcggctatgaagtgattttagtatcttccggcgcagtggcggcaggttatcggaagctcggatttattcagaaaccggaaagcctccctgaaaaacaggcttctgcttccatcgggcagggattattaatggaggcttattcaaagctgtttttagcgcacggttatgtcgcatcacaaattttaattacaagaagcgacttttccgatgaatgccgctaccataatgtgcgcaatacgatgaacgtccttttggaacggggcattattccgattattaatgaaaatgacacggtcacagtcaaccggctgaaattcggagataacgatacactcgcagcgaaggtggcaggtttaattgatgccgacatgcttgtgattttatcagacattgacggtttatatgatgataatccgcgcagcaacccgaaagcgaaaagaatcagtcatgtaagtgacatcactccggaaatagaagcaagcgcgggagatgccgggagtgaaatgggaaccggcggaatgcgttcgaaactggatgcttttaaaattgtgatggcctccggtattaaaggctttctcgggcaggctaacattccggacattctgcttcaagcggtagatgaggcggctgaaggaacttattttgaagcggaaggaaccctgccgttaaaccacaaagaacaatggcttgcatttaattccggccccgaaggcgaaattgtgatggaaaaagaaagcagccgcgatgtcgcgaacggaaatatggagctgtcaccgcaggacatcgagcagattaagggcagattcagcagcggagcggttgtcaggctgcttgatcagcagggagaagagctcggactcggcatcgtcaactattcctcagcccagctgaagacatttaaagaaacgccgcccaaacagaccgatcaatcagtcattgatccggaagcgtttgtctgccacgttgaactatccattccgatcggctgagaaagatctataaaaatatgaaaaagcccgaggcttcgttttgaagctcgggtttgttttttattgatattgttcaagtttggagaaaaattgaatgacaaaatgatagaaatcatttgcagacggagccagttcccttccttttggtttaataatgcctacggtgcgcttcacttgaggaaattcaatcggaattttgaccgtgaaccgaggggtggtttctccaaaggtgctttcaggtaataaagtaactcccatccccgcggagactaatcctttaatggcatctaaatcctcgccttccgtcgatacaagcggcgcaaagccggcctgtctgcaagcgtcaatcgccatgttacggagaataaacccttcaggaaataaaacaaattggtcgccgcgcagatcaattaaatgaatatttttctgtttggcaagcggatggtgcagcggaacaagcgcgtaaatcttttccgtgaataagatattgcctgttatgtcggggaattccgtcggaacggggccgagcagcgcagcatctatatccctgtttcttacggcttcaattaaaaacttataagacccctggcggagcaaaaactcaacgttcgggtattcctctttaaacgccgaaatcaccgtcggcaaaagctggcttgcaaggctcgtcggaaatcctattttgacggttccgcgattcggatcaagatattcatcaatttgttctttcgcgtaatcaattgctttcatcgccgttttaatatgttctaaaaattgtttgccgatcggcgttaatttaatatttctgccttcccgttcaaataaagtgacttgcagctcttcttcaagatttgcaatctgcctgctgatggcggattgtgcgacatgcagatgatcagccgcttctgacacatgttcccgttctgctacctccataaaataccgaagctggcgtaattccattgcgttcacacctatctatctcattttgagatgtatttgatctaaattatatattgtttatattgttttgaaaacttacaattaatttaaagttgtcagattttatgaccgataattaacggaaactgatcgggggagaggaattatgacttacaatcaaatgccgaaagcacaaggtctctaccgtccggaatttgagcacgatgcatgcggaatcggcttgtatgcccatttaaaagggaaaccttcacatgacattgtcaaaaaaggactgaagatgctttgccagctggatcacagaggaggacagggcagtgatccgaatacgggtgacggcgccggcctgatggttcagatccctgatgctttttttaagaaagagtgcggagaaatgagactgccggaaaaaggccgttacggggtaggaatggtctttttctcgcaaaatgaagaggaaagaaaaaagattgaaaaacaggtgaatgcattcattgagcgggaaggacagatcgttctcggctggagaaccgtccctgtaaatgtcggaaaaatcggaacagtggcacaaagcacttgcccgtatgtgcgtcaagtattcatcggcgccgcaaacgatttgaaagacagccttgcttttgaacgcaaactgtatgtcatccggaagcaggcggaaaattggggcgttcaagaacagcttgatttttacttcgcaagcctgtcaagccagactattgtttataaaggtttgttaacgcctgagcaggttgacgcattttatttggatttgcaggatgaaaccttcgtatctgcattctcacttgtgcattcaaggttcagcacaaatacctttccaacctgggaacgtgctcatccgaaccgctatctgattcataacggagaaatcaatacgctccggggcaacatcaattggatgagagcgagggagcagcagttcgtttcagaaagcttcggagacgatcttcacaaagtgctgccgattttaaatgctgagggcagtgactcatccattcttgataatgcgtttgaatttttcgtgatggcagggcggaaaccggcacatacggcaatgatgctgattccggaaccatggacggaaaacactcacatgtctaaagcgaaacgggctttttatgaatatcacagctctttaatggagccgtgggacgggccgaccgccatttcgtttacggacggaaaacagatcggcgccatccttgaccgtaacggcctgcgtccggcacgttactatgtgacaaaagatgaccatattattttctcatctgaggtcggcgttattgaagtagagcaggagaacattcttcataaaaaacgtctggagcccggaaaaatgctgctcattgacttagaagaaggccggattatttcagatgaagaagtgaaaacagaaattgccaatgaattcccttatcaaaaatggcttgaagaagaattggttcaagtgaatcctgacccggaaatccgggaagaggaacaattcgatgatcttctcgtccgtcaaaaagcgtttggctatacgtatgaagatattcagaaatatttaatccctgttattaaagaaggcaaggacccgctcggctctatgggaaatgattcgccgctcgccgttttatccgaccgcgcccaatcactgtttcattactttaaacagctgtttgcgcaagtcacaaacccgccgattgacgcgatccgcgagcagctggtaacttctacggtgacctggctcggagctgaaggcgatctgctgcatccgagtgaaagaaatgcacgccgcataaaattgtatactcctgtattatcaaacgaacagttttatgcgctgaaaacacttgtgcatcctgacattaagagccagaacatccgtacgctgttttccgatgacctagaaaaaggcctgaaggatttgtttcagcaggcggaaaaagcgatcaaggaaggcgtatctctgttaattttatctgacagggcaatgagtaaagagttgacgccgattccgccgcttttggccgtcagtgcgctgcatcagcatttgatccgccaaggactgcgaacaaaagcaagcattatcgttgaatccggggaagcgcgtgaagttcatcactttgcggctctcatcgggtatggtgccgatgctgtcaatccgtatttgacttacgctacgtataagcaggaaatcgatgaaggccggcttgatattccgtatgaagaagctgtcagcaaatacggaaagagcgtaacagaaggcgtcgtgaaagtgatgtcaaaaatggggatttcaactgtgcaaagttacaggggcgcccaaatttttgaagcggtcggcatcggtgaagacgttattgccaaatactttaccggtactgcatctcagcttggcggaatcgatatcgaaacgattgcgcaagaagcgaaacagcgccatcaagcggcgtacaaggatgattacagccaaacccttgatccgggaagtgaattccaatggcggaacgggggagagcaccacgctttcaacccgaaaaccatccatacgctgcaatgggcctgccgcaaaaatgattacagcctgtttaagcagtattctcatgcagcggatgaagaacgaatcggatttttacgcaatctgttcgccttcaaagaagaccgcaagcctttaaaattagaggaagttgaatcagctgcgtccatcgtgaaacgttttaaaacaggagcgatgtcattcggttcattaagcaaggaagcccatgaggctttagcgatagcgatgaacaggcttggcggaaaaagcaacagcggagaaggcggcgaggacccgaaacgtttcgttccggatgaaaatggcgacgacagaagaagtgcgattaaacagattgcttccggccgtttcggcgtaaagagccattatctcgtcaatgcggatgaattgcagatcaaaatggcgcaaggggcgaagccgggagaaggcggtcagcttccgggcaacaaagtatatccttgggtcgcggatgtccgcggttctacaccaggtgtagggctgatctcaccgcctcctcaccatgatatttattcaattgaagatttggcgcagctgattcatgatttgaaaaatgcgaatcgaagcgcgcgtatcagtgtcaagctcgtgtcaaaagccggtgtcggcacgattgcggccggtgtggcaaaaggcactgcggatgtcatcgtcatcagcggctacgatggcggaacgggcgcgtcgccgaaaacaagtattaaacatacgggtcttccgtgggagcttggtcttgcagaagctcaccaaacgctgatgctgaacggtttacgggatcgcgtggtattggaaacggacggtaagctgatgacaggccgggatgtcgtaatggccgccttgctcggtgcggaggaattcggctttgctacagcgccgcttgtcgttctcggctgcgtcatgatgcgcgcctgccatttagatacatgtcctgtaggtgtcgcgacgcaaaacccggagcttcgcaaaaaattcatgggcgatcctgaccatatcgtaaattacatgctgtttgtcgcagaagaagtgcgtgaatatatggcgcagttaggctttaagacgcttgatgaaatgatcggacggacagacgttcttcatgtcagtgaacgtgcaaaagcgcattggaaagcgggccagcttgatttatccacactgctgtaccagcctgaaggcgtccgcactttccgtacggcgcaaaatcataaaatcgaccagtcgcttgatatgacggttattcttccggcggtgcaggctgcaattgaagccggacaggaagcggaagctgaaatcaagatcaataatacaaatcgcgtagccggaaccgtgacgggaagtgaaatttctaaacgctacggagcggaaggcctgccggatgatacgatcagacttcattttaccggatcagccggacagagtttcggagcatttgtccctaaagggatgacgcttcatttgaacggggattcaaatgactacgtaggcaaagggctttcaggcggaaaaatcatcgtgaaagcgcctgatgccttcaattgtgaaacgcacgataacgttattatcgggaacgtcgcattttacggagcaacaagcggggaagcgtacattaacgggcgcgccggtgaacgttttgcagtccgtaacagcggagtcaatgtcgttgtagaaggtatcggagaccacggctgtgaatacatgacaggcggccgggttgtcgtcctcggcgaagtcggcaaaaacttcggggcgggaatgtcaggcggtatcgcatacgtcctcagtgatgatgccaaagcatttaaacgcaaatgcaacatggaaatgatttcatttgaaaagctgacggatgaggcggagatcaaagaagtgcaagaaatggtcaaacggcatgcggtgctgacaaacagcaaaaaagccgcagatctcctggacaattgggaaaaagccgcagaaacctttatcaaagtcattccgaaaaactataaacaaatgctcctcagcatcgaagaacaaaaagcggcgggtttatcagaagaagacgcaattatgtatgcttttgaagccaatacaaaggtcctccaaacgcctgccaaagatcaaaaacaagcggtagtacagtaagaaaggggagaggaacatggggaaaccaactggattcatggaagaaaaacgagaaaaaccggctgagcgggaccctctcactcgcttaaaggattggaaagagtattcggctccgttttcagatgaagcgtcaaagcggcagggggcgcggtgtatggattgcggcacaccgttttgccaaatcggcgctgatatcaacggttttacctccggatgcccgatttataatctgataccggagtggaatgacctcgtctatcgggggcgctggaaagaagccttggagcgccttctgaaaacgaataactttcctgaattcacagggcgggtctgtcccgctccttgtgaaggatcttgtacgctggctatttcagatccggctgtttcaattaaaaacatcgagcggacgatcattgacaaaggttttgaaaatggatggattcagccgagaattccagcgaaacgcacaggtaaaaaagtcgctgtcgtcggttcaggcccggcaggtctggcaagcgctgatcagctgaaccaagccggtcattccgtaacggtctatgagcgtgctgacagagccggcggtctgctgatgtacggcattccgagcatgaagcttgagaaaaatgtcgtcgaacgccgtattaaacttttgacgcaggaaggtatagattttgtaacaaataccgaaatcggcgttgacataacggcagatgagctgaaagatcaatttgatgccgtcattttgtgcacaggcgcccaaaagcagcgcaatctgctgattgaaggccgggaagcaaaaggcgtccattatgcgatggactatttaacactggcgacgaaaagctatttagattccaacttcaaagacaaacaatatatagacgctaaagggaaagacgtcatcgtaatcggcggaggagacacaggagctgactgcgtggcaaccgcgctgcgccaaaaagcgcgcagcgtgcaccagttcgggaaacatcctaaacttcctcaaacgcgcacgaacgacaatatgtggcctgaacagcctcacgtctttacccttgaatacgcctatgaagaagcgcaggcaaagttcggcaaagacccgagagaatattcaattcagacgacaaaaatggtggccgataagcagggccgcttacaagagattcacaccattcaaatggaaaaagtcagaaacgaattcggaaagtatgaatttcatgaactgcccggaacagaaaaagtctggcctgctcagctggtgttcatcgccatcggttttgaagggacagaacagccattattgaaacagttcggtgtcgattcggcaaatcataaaattcaggcggcatatggggattataaaacgaatgttgacggtgttttcgccgcaggggatgcgagaaggggccaaagcctgattgtatgggcgattaatgaaggccgggaagcagcgcgcgaagtcgatagttatttaatggggagcactgttttaccgtaaataaaggggtttatttataaaaccggctgggatcagccggtttttcgtattgaaatgaaacctccttcttcctttattggtcatataagggtaacgtggaagataacatatggaattttgttttacagagtggagagattgttttcttccgcagactgagacgatttgcaagccttgagcagtcgatcacggtgctgctgacgggctctgtgtgtctgcagtcgatttgcgggcagattttaattgatgaagaaaaacatattgaatttcaagcggaaacgcttataaacaaataaggaacggacgcgtccgctcctcttttttagacatccaaacgaaagccgatattgccgaactgccgtccttcccgcattctgttaaaagcggcagctgcttcactgagagggtacatgcggtcgataatgggacggatgccgcagcggtttaccaattccatcatatccgcaaattcctcattgcttcccattgatgtaccgagaatatgaatctgcggaaaaaacagcgagcgaatagggaatccgagctgatcgcctgaactggcgccgaatgttacgatccggccattcggtttcataatgtcaagatagtgttgaaacaaggcggggcctacaccgtcaagtatgatatctgctttttcgccatacagcgcctcattccagtcaccgtagctgtcaatcgcccggtctgcaccgtatgacagtgcggtttgttttttgttttcactgcgggaggtgacgctgactgtcgctccgatagcttttgccattaataaggcgtatgttgccacgccgcttccgatgcccggaaggataaggtgttcgcctttttttaattgtccttttgtaaataaggcgcgataagcggttaatgctgataacggcagcacgcccgcttcctcccatgtcaggtgttcgggttttaaaacggcattttccgcaggaacgatgacataaggtgaaaaggttccgtcgctcggaccgcctaaaatatcaggtacggccggtacgtcctcaacggtcttccaattcagcaccgggttgatgatgacttctgcatgcagtaaatgagaccggacgccgtgtcctatttcggttacgattcccgcgccgtctgaaccgagagtaaattcatggtttccggtttcgtggtttttcattaaaaacaaatcacgatggtttaatccggctgttttcagctttatttttacttcgccgtttcccggccttttgtcaggtgcctgcctgaaatcaaagccattttcgtgtatgataagggcattcatcattcttctctcctttatgattgatgagaaagattttacaggctgtatcagctgcagtaaataaatgaaaattgatagccggctatcaataaaaatcatagcaagaaggtgcccttacatggaaagcggagacttaaagatttttcaggctgtcgcccgcaaaggaagtatttcaaaggcggcagaaagcctgcattatgttcaatcaaatgtgacaaaccggattcagcagctggaacggcaattgcaaacacagcttttttacagcacaaatcgggggatgacgctgacgcccgcaggtgaaaacttattgaaagacgcagacagaatccttcaattgttgcatgaggcgcaaaaaacggcgcaagaggcaggcgatccgaacggcccgcttcgaatcggttctcttgaaacggcggcagccgtccatctccctcaatttttcacagagtattgcagccgctgcccgaaagtacagctgtctctgtcaaccggtgatacacataccttagtgcagcacgtcttacactatgagctggacggcgcttttgtttatggtccggtcgaatacgaagatcttgagcaagtcgctgtaattcaagaagaattggtcttggtttcaaataagcgggaaggcagtttgcaagacttgttgcgagatccgattctgtattttgccgcgggctgttcgcaccgccgcaaaataaaaaacatactgaaagaagaagcagtgcccgcacataaaatcattgaattcggtacgttggaagccattattggggcggtgcaagcggggatgggggtttcctttctgcctgcatcagccgtccgttattttcaaaacaggaaaaatctttttcttcatgagctccctgaacagtttcgggatatgaatatatcatttatctaccggagtgatttatttttgacatcggcgtttgaagaactgctgaatggattaaaaactttaccgaacggaagatgagaaaacaggacagctgtgtacgccaatttttttcgttctggtttttctcaaaagaaagcgggtatccgggctgagcttgatcagcgcgatgaaaaactcggctattaaatcagagaagcacaaatgaaaaaaataccgtatattgctgttgtgggagatcgagagtgccgccatcaatctgtacatgtaaggcaatacgggcgggaagacacatttgaagagaatgtgagtgattttatttcccggatcataagagaggcaaaacaaaaaatagagatttaacaaaaacaacattgacatatcgtaaaatcacgatataataaagcgtatgaaacctattgatgtttttaaagcgttgtctaatgagtcacggcttgagattttacaatggctgaaagagccggaccgtcacttcgccccgcatgatggcattgatatgaatgagatcggagtatgtgtcagccagatcaccgataagcttcagatgacacagtcaacggcgtctcaatatctttccatccttcagcgggcgggccttatccaaacaaaacggattggcaaatacacctattataaaagagatgaagaagcgataaaggcgatggccgattattttcagcgcgaaatgtagggctgaatcctttagaagagggattcagtttctttttccgactacacatcgacatattgcgatttgtttctgttttcaactctttatatcgatatatcacaatatatctttatataaatcatcaatgaaggagtgtgtcaggtgcaaaatacctggaagatttacattttggcaattatcagttttttagtggggacgtctgaatatgtgatatcagggatgcttgataaaattgcaggttccttgggagttactgtggcagcggcagggcagctgattacgattttttcacttgtttatgcaatcggaacgcctgtcatgatggcccttacagcaaaactggacagaaggaagctcatgatctatgctctggggctgtttgttatcgggaatatcatttctttccttgtgcagggattcggcttatttgcgggagcgcgggtgatcatggcgcttggagcaggaactgtggtggtcaccgcgcttacgatcgcagcaaaaatcgctcccccgggaaaacaggcaagttctctcgcaaccgtcattatggggtttacggcggcgctcattatcggtgttccgatcggaagaaccgtgtctgaagcttttggctggaaggtggtttttgccggaattgcggcaatcggaatcattgccatgcttattatacgtttcgcgttgcctgagataaaaggagataaaccggtgccgctcattcagcaattttctcttttgaagaaacgaaaggtggctgtcgggctggccattacgtttttttggctcggaggctattcggttgcgtatacgtacctttctccgtatttactgaacgttactcatatcggaagcggaatactgagtacattgctgcttattttcggtgttgcaagtcttgccggttctaaagcaggcggtttcagcgcagacaaatggggggcgcgtatgacattaaccggcggaatggcgcttcatgctatcatgctcatgttattgccgtttgtcacacattctgctttcggagcggcggcagtgcttattttttggtccttcgccgcctggtcatctgggcctgctcagcagtatcatttggcaacgatggagcctgaatcatcgggtgtattacttggcctcaaccagtctgtcatgcagctggctatggcagccggagcgggcatcgggggcattgttgtcacccatctgtctcttgcgtcagtgacatggatcggatcagcgggtgttgtcatcgcgatgtgcggcgtgctttcgcttgcgtcattaacgtctgaaaaaacctcatctgaatacagtgcagaataaacaaaagcctcatttctcagcttgagaaacgaggctttttgtcttgtcatttttcacattttttcaagtttacgccgattgcggctccgtttcggcttgagtcggcaactccggtgaaggtgccgttttcacggtcgatcaggatgctttgcacattcccgatatcaaccgggctgctgccgaatttatgccccatttcgttcagttttgtgcgggcttcttccggcactcctttttcatatcgataggatgtcatgctgtttgtgtaaattctcggctcttcgaccgccgctttcagatccatgccgtactcaactttgttcaggatcgtttgcaggacggaagaaataatcgttgctccgccgggggagccgacagtcaggacaggttcgttatttttgaataaaatagtcggagtcatgctgctgagcggacgtttattcggctgcacttcatttgcaccgccaggcaccgcatcgaagtctgttaactcattattcaacacaacgccgtatccgggaaccataatgccggaaccgaacagctgttcaatcgttgtcgtataagatacgacattgccgaagcgatcagttaccgtgaagtgagtcgtttggccttcttgtttgtcagtcggctgctccacttgtttatagtttgcagaaccttcctgataggcccaagggtcgccggctttcggttttttattgactttatcaatatctatcagctgtctgcgggcattgatataatctggattcaagaggcctttgagagggacgttgacgaattctggatccccggcaaatgcggcgcggtcagcataagccaaatgcatcgtttctgcgagaagctgatatttttgccaagaacggatatcatattgagaaagcttaaaatcatccagaaggttcagcatttgcaacaggaaaacaccgcccgagcttggaggaggagcagttgcgatatgatagccctggtaatctccccagatcggttcgtcaatcgtcacattgaagtttttaatatctttttctgtcattgagccgccgaattcctgcactgtttccgcaagctttttggagaatgctccgtcatagaatgcttttgtgcctttgtacttaatagctgtaaatgttttggctaagtctttttggatgagtgtgtctccttctttcagaggttctccgtccggaagaaacacgtcttttgcagcagtgtgtgataatttgtctttataatctgagatggcatcagctaaaaccgaatcgatcggaaagccttttgaggcaagtttaatggaaggggtgatgagttgtttcatggagcgtgtgccccatttgtcgagcgctttttcaagtccttttaatgttcccggaacaccgactgcagtccctttcgtaacgcgttcggagaaagggatggctttgccgttttcgtcaaggaacatatccggtgttgcgcctgccggtgcgcgttctcggctgtcgataatggtggtgtctttcgtcttcgcatcataaaccatcataaatccgccgccgccgattcctgacatcataggttcagttacgtttaatgcgaattgaatggcaaccgcggcgtcaattgcattgccgccttttttcagcacgtcggcaccgatttgtgaagcgagagggtgggcggtggcaaccatgccgtctttgccgacatctacctgtttgtagtcgtcataggaaaacgggtgtttcttagcctgagcgtgataagggatgcttccggccgcgagcaacgtactgagcagaacgataaaacagagattcataaactttttctttttcatagtctgcctcctttgttttccgcttacaattatagagtaagtaaaatgtgctgttttcacaagtgacaaacggaatagtccggtgcgcaaaaagccggagtttctgtgtgaatgtaatcagtcgcaaataggctaaatgggaaaccggactgaaaaagctgtgaaacaagcataaagacaaaaaataagctacaatgaacaaaacagaattcactcacatgacatatgaaaggaacgtgagccatgtatttaacgatcaaagagacagcggagtttaccagtcttcctgaagaatatgtgcacaatcttgttttgacgaataaaataagggccgtccatgacggacagcaatatttaatcaacaaggaacaatttcaaacccatctcgagcagttggaaaaatacaaggaaatgattcaagagtttttaaatgagccgcttcctgaagacattgatgtaaaagatgaagactaggacacaatttcatattgtgtcttttttttgcatttttttcggttgctcacaaaaaaacggatgctcagatttcattttaaggccgttgttttcattttttaatgccttgagtctctatttgtttaaaagcttgtcaccggtctgaaaatgatgtttttgaggaatttgttgaaactgcgtatctgattcaccttatgtaacactatgtatattatgttacataagaccctttatcctttatcattcaacgggtttcggctataatagtaacataatgctcaatatgttactttactattataaggggttttttgatgcatatcgtacagccgatccgaagtttggagaagatccaggaagtcaaacagtatttaatgaagaaaagtgatcgtgattattttttatttattttcggcatgaacagcgcactgcggatttctgatgttctgccgcttcgcgtgagggatgtaaggaacaaagaccacgtgtgggcaaccgaaagcaaaacgagaaagaaaagaaaaattctgatactggagtctttaaaggccgacatatacgcttatacaaaagacatgaaagaagatgactatttgtttaaatcgaaacggacgaataagcccatatcccggattcaggcatacagaatattaaaggaagcggctgccgcttgcgggttggaggaaatcggaacgcacacgcttagaaagacgttcgggtatcatttttatcagaggacaaaagacattgctgaactgcagaggattttgaatcattcttctccgtctattacaatgcgttatatcggaatagatgaagatacgacgagagccgcctataaagtgttcggaggactgtaggcttgaaaaaaacggccgccagcgttactataatagaagcaggctctagtagcacagcggatagtgcagcagtttcctaaactgcaggtcgggagttcgaatctctcctagagcgttttttgtatgagataggcgcagcttaataatgtcggtaaaacaaaaacccccttgttatacaagggggttttgagttgaatattttgtgagaacctggtggaaatgatgtgaaaaaagcccgctgtaagcaagcgggctttttcttatatgacagcatcaaattgattgactttccaaacgttgttttcttttacgaatgttacatcgcgttttgctgacggagaaccgtcaagagtcggtacagtgaagcggtatgtttggacgcttccttttttagaaagaagggtcatttttgcttttttccaattcaggaggttatctccatcgccgaccggaacagccaatttgccgtcttttacagtgaagtggtaatctttgagccctttgtcaatcgcttgctttgtaaaagcgggtgtcagatattttacggctttcgcttttgttccgaggtctttgcacataaatacatattgcagattttgatattcaaacggttcagatgtgcaatttgcgtttgatttaagcgcaccgccgctcattgtattccagaaatgttctctcgctgacagggccagctgaagtgcttgtttttgtgtaaggtcattaggtgcattttttgcagtcgccgcagtgcccaatgatagaatcaatgtaatagtagtgaggaataatagccattttttcatgatataatctctccttcaatcaatctctttctcttatgttacaaatgttacaataattacggtaagattacaataccttttcagaaatattttccggactttttatttttatggtttatttccatgtaagacgtgagaaaaagataaagagtttcattgaacaaaaggtttttacaagctgtctgctgaataataaaatggaagaaaatcaaaaaaggagtcctacatatggaagtacaagatcatttagaaacagcggaaggccgcggccagtcagtctggcgatcgatgtcactgtttttagtgccgctgcttttaagcaatgtattgcaatctgtcggccaattggtcggaatggtatttgtcggaaggtggctcggagtcgatgcgcttgccgctgtatcgtctttttttccgctgttttttctgctgatctcctttacgatcggaatcggttcggggagttccattctgatcgggcaggcttacggcgcgaaaaacgaagagaggatgaaggcgattgtcggcactacactgacttttacctttatgctcggtgttgtcctggcagttgtcggcagtgtgtttacgcttgatattctgcggctgatgggaacgccggaaaacgtaatagatgtcagtgtccgatatgcgcgcattttgttttgcgcaatgccgctgatgtttttatattttgcgtatacgacatttttacgcggaacgggagattcaaagaccccgttttatacgttaatcgtcagtacagtcataaacatcgggctcttgcccttattgattctcgggcttttcggacttccgaagttcggcatttacggttcggcgtatgcaaccgtgatttcaaacatcgtgacatttatcgtactcatgatttatttgcggaaaaggaaacatccattggcatttgaccggactgcgctccgttctcttaaaatggacaaaaagctgctcgcgcttttactccgtctcggtattccgtcgagcatcaatatgattctcgtgtcactttctgaaattgcggtcatttcatttgtcaatcattacggatcaaacgcgacggctgcttacggggtcgtcaaccaagtggcgagttatgtgcagatgccggcggtaagcctcggtatcgccgtttccatttttgccgcccaatccattggcgccaatcaattcggccggctgaaacaggtcatcaaagtcggcatcggcctgaattatttgatcggcggggttttgattgtgctgatttacaccttctcccggcagatacttgctttgtttttaacagatcaggatacactccacattgcccgcaatctgattatgattaccctttggagctatttgattttcggtcacgctcagatcgtttcagcgacaatgcgggcgagcggtacggtgttatggccgacgattatcagtatttttgcgatttggggaattgaagtgcctgtggcctttattctttctcattatacgaatctcggcattctcggcatttgggtcggttatccggcggcttttgtcgtcagcctgctgctgcaatacggatattaccggtttgtatggaagaaaaaacagattacccggctgattcaataaggttttaccgcacatcgctcagttcatacgggcgatgttttttttagagaaggaaaatgagtttagaaaatggaattcctatacatgtagaaaacaaggaaagggcaggtgcttatgacgattgaacatacgacttatttaggggcttcagccataaaagcggagactgatcaggctgaatgcatcattgtgccggagtggggatcaaatgtcatatcgcttcgggataaaagaaccggtatgcggcttctgagagaaccggaaactgcggagcaattccgcaaaaaaccgatgctgtacggcattcccgttttattcccgccgaaccggattacggatgggacgtttcgttttgacggccgcgcgtatcaatttgagataaacgaagaggataaacataatcatattcacggctttcttcacaatcagcattggaaagcggcggcagcgaaagaagagggggatggaatgacagtcgaaacagaaattgatctttcaaagattccccgtgttcataaacaatttccgcacgatgtcattgtccggatgacctatacattaaaagacaatgtgtttacgcagcgggcgctgattatgaataagggaacggaggcttttccttgggggctcggctatcattcaacttttgttttcaatgaagagcgatcccgtctatttttgacggctgaccgcatgtgggaattaaatgaacgtttcgtgccgacgggccgtttattggatgtgcctgataaagaagcgttccgtcagggggtgtctttgaaaaataaacagtttgacgatgtttttctttcttccggacggaatggcggcaataacgaagctgttatttatcatccggatgagcaattatccgtgctgtatcaagcagacatgtctttcaagcattgggtggtatataacggtgacggaaagcaagggtttgtcagtcttgagccttatacttccgttacagatgcatttaatctgaatcagcctgcatcactgacagggcttcagattctgaaaccgggcgaagaagcggctgcgtcatccaggatcaccattttgcatgacgaagaataggaaagaggcgggataacattgaaaacatatgtgaaacgcttgagcgcggtgattctgcttttggtcattgccgcagttccttatattgatgaggcggctaaggcggctgaacaaaaaaatactttgcaaaaagagctggaacacattctggatgaagaacctgctttaaagggagtttcagcgggcgtcagtgtccggtcagcaaaaacaggggaggtgctgttcggcagccgggaagatatgcggctgaggcctgcatcactgatgaagctgctgacggcatctgcggcgctttccgttctcggagaagattacacctttaagacagaagtacgggcagacggcgccgtgaaaggaaaacagctgcgcggaaacctttatctcaggggaaaaggcgatccgaccctattggcttctgattttgagaagatggctaaacaggtcaaagccagaggcatccatgtcattaaaggagatctgatcggggatgattcgtggtatgacgataccaggtattcagttgatcttccgtggagtgatgaaggccaatattatggcgcgcaagtatcagctcttaccgcttccccaaatgaggattatgataccggaacggtgattgcggaaatcagcccggcaaaacagcccggtaaaaagccgcgcatttcgatttccccccatacggacgtcgttcgtgtgaaaaatgaagtgaaaaccgtcgcttctgatgaagcgaaagaattgacggttgaacgggagcacggcggcaatgtgattacgataaagggaaccatacctgccggctcggcaaaggcaagagaatgggcggcggtgtgggatccgtcgtcctatgctttagatttatggaaacaagcgcttactaaacagggtataactgtaaaagggaaaatcagaacagggcgaatgccgcaccgcacccagcttgtcacatcacggacatccatgcctctttcagaattattgatcccgtttatgaaactgagcaacaacgggcacgccgaaattctgatcaaggaaatgggaaaagtgaaaaaaggggagggcagctgggaaaagggcttggacgtgatgaaatcggagctcaaatcgttcgggctcaatccggataaattgattgcaagagacggatccggcgtttctcatattaacggcgtatccgccggtcaaatcggagagcttttgtatgcggttcagaaagaaaagtggtacccggctttccttcgttcgctccctgtcgccggtgcaagcgacagaatgacgggaggcactcttcggaaccggctgaagaatactccggcagagggcaaaattaaagcgaaaaccgggtcactaacatcagtcagttcgattgccggctatgcagacacaaaaacaggagatacgcttattttttccgtgcttcaaaacgggctgcttgacgaagatgacggaaaagacattgaagacaaaatcgcagtcgtgctggcaaatcaataagaagggccgaatccttagaggattcggctttttttgatgtctgtaaaacattatattgcgattatgaatcaatcttttcaaaaagtaatatcggcaatacccttccttttttttacataccgctttcttacatgttcaccgattattcattttttaacataaaacttcttttcgggaggaaaacctttttaaaagcgcaattaattatacattttattccttattatagtgtttaagaaccagtttacagtatgcatacataccgttttacatggtataaagattatagaaatgaagaagtgaagtgaggaatatatactatattctaaaaaatgttagagaaaatttaattttttattgtgatttctaaaatatgttttaaaataatgcttatatggatgattaagtcatatgctgtcgaaatttaattgtaattatttcactttcttatcctcttaaattgaagcggagggattccattggagaacactgtttattctttaactcacgcacaaagaagagtgtggtttacggagctgctcgaaccgggcacaagtatctgcaatctcgcggcatgtgtcaaattcaggggggacatcgattttgacgtactgcgccatgctttagatttttctatctcgcaaaatgattcgctcaggtttcaactgacagaaggggacggatcagaaccccagctgtatctggcggggcatcggccgatttctctagagactgttgattttactcatactgatcaggcagagcgggacgcatggattgacacgcagacccgtgttccgttcaagctgtttcattcacctctgtatcaatttactctgcttgtcatgtcagacgaagaagtttggctttattcaaaatttcaccatattatcatggacggcatctcgctcaacctgctcggcaaccagctcattgatatctaccaaaagatcatgcggagcgaggatttagctgaacatcacaagccttcctatctcagctacatggaaaaagaacagcaatacttacagtcttcccgttttcaaaaagaccgttcattttggactgaaacataccgaaccgttccggaacacctttcactggcggaacgaacctctcatcttagacaaagcactgcggcttccagagatacaatcactctttctcactccttagaacaatctatccggcgtttttgcaaagaaaataatatcagcatcatctctctgtttatggcttcgttatacatatgcatcagccgtctgacggctaaaaaggatattgccatcggcacttattacggaaaccggggctccaggctcgaaaaggatatgctcggcatgttcgtcagcacactgccgatcagaatgacggcagatcctgatgcagagttcctgtcctttgtccgcagcgtaggaaaagagcagctgtctgttatgcggcaccagaaatatccttacaatctttttgtgaatgaattaaggcagactcatcatgacctgcaaaatatcatcggtatttcgatgcagtatcagccgcttgagtggcgtaaggcagacggtttcgattatgaaacggccatgtttttcagcggacataccgcaaacgagctctccattttaattaaggagcggacagatacgggattgattgagctgaattttgattaccaatccgctttatttactgaaacatcaattaaacgcattcaaactcatttgctgacgatcgttgaaaatgccgttagaaatccagaccggctgattcggcatattgatatggcggatgaaaaagaaaagaaacgggtgttatcttcgtttaaccgtacagaagcggttgaaccgccggctccgacgcttcacgggctgttcacccgccgtgccgcgctttcgccgcatcgtccagcgcttcgttttccgggcggtatgctgacgtacgccgagcttgaccagtacacagacagactcgctgtttggctccgacaaaaaggcgtccgcaaagaaagcatggtcggcgtgctcgctgaacgctcgccggagatggtggtttcagtgcttgccgtgttaaaagcgggcggcgcctacgtgccgcttgacccggagtatcctgaggacaggctgcgctatatgctcgatgactgcggcgcttgtctcctgcttgcacagccgggattatccgtttccggtttttccggagaaacgctagaagtgtctctttctgctctgacaggcgagacggagacaggggctgtctctgaagaagcggatagcgattcgctcgcttatatcatttatacgtccggttcgacgggaacaccgaagggagtggctgttgaacaccgtcaggccgccgcctttttatcagggatgcaagggcagttcccgttgacggaagaggatattatcgttctgaaatcatccttttctttcgacgcttccatctggcaattgttttggtggacgatgtccggcgcctccgtgtatctgcttcctgccggctgggagaaagatcctgtgcggatgattgaagcgtttgcctcagaaaaggtgacgaccgcgcattttattccggcgatggtcaacagctttttagatgcgctggaaacagagcctgcggaaacaagaacacgcctcggcagaaccttgacacgcgtgtttgccggaggggaagctctttcaccgcttacggctgcccggtttgccgatcttctgccggagaccgtgctcattcacggctacgggccgacggaagcgacggttgatgcggcgttttacgtctgtgaccgaaaacgggacagcggacggacaaggcttccgatcggaaaacccgttccgggtgcccgtctgtatgtattagatagcggaggaaccatccagcctgcgggcgtggcaggagagctgtacatcgcggggacaggggtggcccggggctatctgaaccggcccgagctgacggaggagcgttttctcgatgatccgttttatccgggagagcgcatgtatcagacgggcgatatcgcacgctggacagaagagggcctagtcgaatggctcggacgttcagacggacaggtgaaagtccgcggctaccggattgaaccgggagagatcgaagcggcgatccggcgcatcgacggcattcgtgaggcggcggtcaccgcccggaccgaacacggcgaaaccgcgctttacgcctatatcgaaggacgggaaagcgatgacgtgcgggcggagcttgcgacacgccttccggtctacatgatgccggctcagtttatagagatgagcgaatggccggtcacgccgagcggaaagcttgaccgccgcgcgctgccggctcccggcggagcggcagacagacaggcgtacaccgccccgcggaacgtcacggaaatgaagctttgcgccctttgggaagaggtgctgaaaaacggccccgtcggcatccgggatcacttttttgagcggggcggccattcgttaaaagcgacggctctcgtctcccgcatcgccaaagagttcggtgttcaggtgccgttacaggacatcttcgcccggccgacggtggaagagctcgcttcggtcattcaggatttggaagagagcccgtatgaagcgattcagcctgcgaaaaaacaggacacctatccggtgtcttcggcgcagaaacggatgtatgtgctccagcagcttgaagacggcggtgtcggctacaatatgccggctgtgctggaactgacgggcccgcttgaccgcatccggctggaggagacgttccgggagcttgtggagcggcacgagtcgcttagaacgtcctttgaaacggggcctgacggcgaaccggtgcagcgcatccatgacagcgtgccgtttcagctggatgaggccgagtcagctgacgcattcgtccggccgttttgtctggaggaagcgccgctcttccgtgcggctctcgtgaaagaatcagacgaacgccatctattattaacggatatgcatcatattatttctgacggtgtgtccgtcaacaccttgattaaagaattcggcgagctgtacgcaggccgttcgcttgcgccgatgcgccttcaatataaagactatgccgtctggcagcggtcatttcaggagaaagaagggtaccagaagcaggaagcctattggctgaagcggcttgaaggagagcttccggtgcttgagcttccggctgacaagccccgtccggctgtcagaagctttgcgggcggcagcgtatcgtgcacgcttgacgctgaaacggcatccggccttcaccgcatcgcccgggatcacggctccactttgtatatggtgcttctcgccgcgtacaatacgttactcgcgagattgagcgggcaggaagacatcatcgtcggctcgccgattgccgggcgtccgcacaaagaccttgaaccgattctcggcatgttcgtcaacacgctggccatcagaacggagccgaaaggagacaaacggtttaccgattacttggcggaagtccgccaggcggcgcttgaggcgtatgagcatcaggactatccgtttgaagagctggtggaacggctcggggtgcagcgggacatgagccgcaatccgctgtttgatgcgatgtttattcttcagaatatggagcgagaagagataaatctggccggtctgaaggtgtcacgatcagaacataccgaacatgatgtatcaagttttgacctgaccttatcagcggctgaatccgatggaaacatccgctttgaaatggaattcagcaccgagctttttatgaaagaaacgattgaacgctggatgggccacttactgaatctcttgcgccatgttgccgccgaaccggaagtcacactatcgaaagctgacattttggatgaagaagaaaaacaaaagttactgattgagtttaataacacacaaaccgaattcatggaaaaacacaaactgtttcaccagttgtttgaagagaaagcagaagaaacgcctcatcagaccgctgttattgaaggaacacaacagatcagctattcgcagcttaatgagcgggcaaatcggcttgcgcgaacattacacaaatatggattcggtccgggaaaaagagcagctatattggcaaaccgttcgattgaagcgatcgtcagtgttcttgccgtcatgaaatcgggaggggcgtatataccagttgactcccattatcctgaggaacggattcgctatttattaaaagacagcgcggcatccgtcttgatggtgcagtcagaatacaaagaacttgcttcacagctgacggatcacaatttatttctcattcagcttgatcatgaagatcaatacgatatttgtgcaaagaatattcagccggcagcgtcaccggatgatactgcatatatcatatatacttcgggaacaacgggaacgccgaagggagtcgaagtcagaaatcgcagctttacgcatgcagcacttgcatggcgcaggatttatgagcttgatcttataccggtcagagtgctgcagatggcgagtttctcatttgatgtattttcaggagatcttgcacgcgccctgctaaacgggggaacgcttgtcatttgtccggatgacgtccggcttgagccgcaacagctttatcggctcattgatcagtaccgtatcacgtttatggagtcgacacccgcgctgattgttccgtttatggaatatatatatcgccggaagctcgcgctgcaaagtgtaaaaatactggtactgggttcagatatgatcaagtcgcaggatttttatacgcttcatgaacgcttcggaaaagaaatgcggatcattaacagctacggtgtaacagaagcgacaattgattcttcgtattatgaagccgaaatgagcgaaaagccgcaggaagatgatgtgccgatcggtgttccgcttccgaatgtacaaatgtacgtcttaaacaaagacaaacaggtccagccgatcggcgttttcggagagctgtatatcggaggggccggcgtcgccaaaggatattggggacagcctgagctgacagagggcgcattcagtgacccgttacaaacgggagaaacgctttacagaaccggagatcaggcttgctggctgccggatggtactcttcgttttcaagggcggattgataagcaggtaaaaatcagaggctacagaattgagacgggagaaatagaaagtgtgcttttgaaacacgatcaagtcaaagaagcggctgttaccgtgatgaaagatgccgaaggacaagcccgattagcggcatacatcgttcctaaagaggccgatatctcatcacttcgccagtctctaatgcaggagctcccggcttatatgatgccgtcccatattatcggtttagacagcatgcccctgacactgaacggcaaacttgataaatcggcattgccggcagaagagatacattcatcccaggcatttgtcgcgcccggcgatgaaaaacaggcgatgttatgccggatttgggaagatgtgcttcatattcagaaagcgggaatccatcactctttctttgagcttgggggagattccattaaggcgcttcaagtgtcagcccgactcgccggagaaggctggaacatgtcgatccgcgatttgtttcaattcccgacgattgcagaactcgcgaagcacctcacgccggctgttgcaactgctgatcaggggccgatagaaggaagcgctccgctgacaccgatccagcagagattttttgaggagccgggtgcgtttgagcttcattataaccaagcggtcatgctgtgcagtgaagacagcctcgaaatagatgcgctgtatcaggcggtttgcgcgctgaccgaacatcatgatgcgctgcgaatgactttcactgaaaatgagcatggggaaacggttcaatataatcgcggaatcacaaagcagtatgaagaaatatttacgcttaacgtcatagatatttcagaagaaacgcagcccgaaaaacggatagccgctgaggaaaaagaaatacagcaggctatgcgtcttgatcaggggcctctgcttcatctcggagtgttccgtcagaaggaagccgaccatcttcttataacgattcatcatcttatcacggacggcgtgtcatggaggatattgcttgaagatctgcagacagcttatcagcaggcattggacggcaaacaaatcgaactgccgccgaaaagcgattcttatataaagtatgccgaagaactttttgacatttccaaaagcaaagcattgctggaggaagccgcatactgggacagcgtgatgtctagtgaaacagcgccgctgccgaaaataactgatgaaaacgccggacgattgcaggaaaacgcgcgcactgcatcgtggatattaagcagcgaagtcacgaaacagctgctgttggaaacacagcaggcatacggaacggatgttcatgaattgcttttaacggcgcttggaatggcgcttcatgagtggacgggttctgaacagatccttatcagcactgaggggcacgggcgccaggggcatatgcctgacattgatatgtcaagaacggcaggatggtttacatctgtttacccggtgcttttggatatgagagtgtcgggaggctcaggcgaaaaaaccgctcaccgcataaagacggtaaaagacatgatgagacgggttcctcatcacggaaccggctacgggctgctgagatattcgcgaaacattctttataaagacccagaaataagctttaactatctcggtgcgtttgacggtcttgaagggacactgaagatgtcaccgttcaagccgcagcatgatatagcggccgggcgcatccgcgaatttgatctggatattaacgcgatggtggcggccgggcaactggaggtaaaagccgtttataccgatgtatttgcaccgggggcaatcgagttcttcatgaatcgtttccatactcacctcgaggacatcatcgcccattgttccggcaagaaagagcgggaaaaaacattaacggattacagccatacagaattgaccgctcaagcactatcaagcattgaagatctcgtaaaaggactttaatttcataaaaaggtgtgtggcattcgtgacacaagcgacagaaattcaagatatttaccctttatcatatatgcaggaaggcatgctgtttcattcgcttctggattccggatcaaacgcatatgtcgagcagatttcgtttacggtcagcggggatttatgcattgatacattccaaaaaagtctggatatgcttgtcagccgttatgatattttcagaacgattttcataaaagaagtgcctgaccttgaaggaccgcagcaggttgtcctttcacgccgtgacacagccgtacagactgagaacatttcagactattcggaagaacggcagcaaagcatcattgacaaattcaaggaaaccgaccggcataaggggtttgatctgcaaaaaggccccttaatgcgcctgactctttttcaaacgggagaaaaccgtcatacatgcgtttggactcatcatcacattatgatggacggctggagcttgggaattgtactgaaagatttcttcagcatgtattatgcgatccgaaacgggcggcctgtaaacctcggcagtccggctccttacagcacttatatcaaatggctccgaagccggaataaagaagaaacgtcagcgttctggtcgcgctgcttggaagattacggagaaatcgtttccgttccgcaaacgaagaataagccggcgcagaacggttatgcatctgagcattttcaattttcccttgagtctgaaaccgtgcaaaaactgacagacattgcccgaagcacaggggtcacgctgaatactatatttacgggcatttggggcctgcttctccatcgttacaacgggactgaagatgcggtcttcggttcggttgtttccggcaggccgtcagctatcgccggcattgaatccatggccggactgtttatcaataccgtgccggtaagggtgcgcgcggctggtgatatgactttttcttctcttctcaaaaaggtgcaaaaagagtcactcgctgcggaagagcacagctattatccgctttatgacatccaaaacgagagcggcctgcaaaaagatctcttgaaccacatcctggtttttgagaattatccggttcagatgcagactgcggtaaacggctggcagcaaacggaaagcaatgcgctctcccttgaaaacttttcgatggcggaagaaaccaattacgatcttaacgtcgtcatcgttccgggagaagagttttatgtgaaattcagctacaatgcgggcacctacgatcgggaagacatgaaacggatcaaagggcatattctggaggtcatctcctgtgtaacggaagatccggacaggcttttatcaagcatcagtctcgtacctccggaggaagaagccctgattcattcgtttaacgaaacgaaccgtccgtaccctgagacaaccgttcatgggctgtttgaagaacaggcggcaaaaacgcctgaccaagaggcgttgagatataacggggtaagctggagctacaaaaaattaaatcagcgggcgaatcagattgcccatgcgttaagggaaaaaggcgcccgttccgatcagatcaccgctgttatgctgcgccgatcaatgagtacggttgccgctctgctcggaatttggaagtcgggcagcgcctatatgccgattgatgcggaatttccgcctgaacggatttcatttttactgagagacagtgaagcctcactgctcgtgactgaaaaagacctgctccccctcattccgccgcatttcaagggcagcgtcgtcatcttggaggaaacggtttcccagcagaccgcaccgcttccgccggtatctgacagcggaaattgggcgtatgtcatttacacctccggaacgacaggccggccgaaaggggtgcttgtacaacacaaagcgatcagcaatacattgcaatggcggcgtgaagaatacgggatgacagaaggggacatagcgcttcatcttttttcatacgtatttgacgggtcattaacgagtcttttcactccgcttctgtcgggcgcctgtgtattgttaactgatgaagatgatgcgaaagacgtcctttcaataaaacagaaaatcacccgacacggagtgagccatcttctgatcgttccgtctctgtatcgcgttctgcttgattcgctgacgaaaaaggatgcgcagacacttcgggcggtgacatttgccggggaagcggccactcctgatatcgtggaagcgagccgcggcatatgcccgaatgccgagctgctgaatgaatacggcccgacggaaaacagtgtggccacgacgattctgcgcaacctgcaaaaaagcagccggattacgatcgggcgcccgattgccaacacttctgtctatatgatgcacggagatcggctgcagccggtcggagccgtcggtgaactgtgtatttccggaaaaggtctggcggacggatatttccagcaaaaagagctgacggacaaagtctttacccctcatccgtttcgtgaaggtgaacggctgtacagaacgggagatgcagcccgatttttaccggatggaacgattgaatatatgggacgctttgacgatcaggtgaaggtaagaggttacagaattgaattaggagaaatcgaaacggcactcagaagtctgtccggggtaaaagaggcggcagtcaccgtgcgcaaaatggcggacggggaacaggagcttgcagcttatgtcgtactggaaaatgcgggtgtgacatttaaaccgcacgctgaattggccgggagattacctgcttatatgataccgggaagctttaccaaattaacggaaatgccgctgtctgtgagcggaaaacttgatcgggccgcacttcctgagccgaaagaaaccgagagaaccggtgattatcaagctccgcgcacaatgcttgagactgagctgctgtctatttggcaagaagtgctgaaacgggaacacatcagtatgagagatgatttcttccaaatcggcggacagtcgctgaaagccgcgtcgcttgtttcaaacatacataaacggctgcaaattgaacttgccgtccgccatgtttttgaacatccgaccatcgagagcatggcccgcttccttgaacagaggaaaagaggagaatatgcagaaatcacgcctgctgtggcaaaggacttgtacccgctatcttttgcgcaaaaaaggctctatgcccttcatcagcttgcagcggacagtacgggctatcatatgcccgcttgtctggaactgagcggcagactcaaccgggatcgtctgcacgaagccttttcagcgctgttacaaaggcatgaagcgttacgcacttcatttgttttgcgaaacggggagccgatgcagcacatacatgcacatgtcgatcttgacctcacagagattcacatgccatccgggaaccttcttcaagaggtgatggaaactttcgtcaaaccgtttgacgtggaaaaagcgccgcttttgagagtgactttagccaaagttactgaagaacgtcattttctgctgcttgatatgcatcatcttatcgcagacggtgtgtcaatgagcgttctgattcaagaattgacggatttgtacagaggaaaagagttgcggccgttaaaactccagtacaaagatttttccgtctggcagcatgagcggtttgccgctgaagaattcaaaagacatgagcgttattggctggatgcgatcggggaaaacattcccgttcttgatctgccgctcgataaaaagcgccctcagcttcctgatttcagcgggtccgttgttcgaacgcgccttcaaaaggaaacggcggagaacttgcgccggctcatggatgagacgggttcgacactgtatatgattcttttggcaagctactccttgttcctttctaaattgggcgggcaggaagacattgtcgtcggttcacctgcggccggcagaagccgcgctgagcttgacggggtcatcggcatgtttgtaaataccgtggcaatgagaagcaggccgaaaggggataagacattccgcgcttatttagaagaggtgaaaatgctcgccctcggcgcggccgaacatcaggacttcccgtttgaagaacttgcccaaaagcttgatacacaccgggaagtcaatcgcaatccgctgtttgatgccatgctcgttttgcaaaacagtgataatttcgaagtgaaccttccgggcttatccgtttcttcacatgcagtgaagcatgacatttcaaaattcgacttgacgcttcatgccgaggaacggccggatggctcactggattttcattttgaatacagtaccgcgttgtttgaaaaagatacgatcgaacggtgggccggtcattttaaagagcttttaggacaaatcgcagcggattacgaacggaagctgtctgacattcatttgctgggcataaacgagcggcagatgcttcttcaagcggaaaatcaaacggcggagtatccgaggcatgaaacgattgtcagtttattcgaagcacaggcggaaaaaatgccggatcaaattgcagccgtcatgtctcatgagcgtctcacctaccgcgagctcaatgaaaaggcggatcgaatcgccgatatgctgtcggaaaacggcatccgctccggacagattgtcggatttatgaccgaacgatctccggatatgctgattgggattctcggtattttaaaagcgggaggagcttatctgccgattgatcctgactatccggacgagcggatttcatttatgctgactgacagcggcgcgcgtgttctgttgacgcaatcgggtcttgggatatccggaatggacgggctgccggttttatacatcgataagcctgaatccgtttcagcagacagaacgaaagaaataataacgcctgaacagccggcttacgtgatttacacatcgggcacaacaggaaaaccgaaaggcgttatgacggaacaccgcaatgtcatcagccttatcacacataaaggactgccgtttgatttcggctctgaagacgtctggacgctgttccattcctattgctttgatttttctgtctgggaaatattcggcgcgctcttatacggcggaaaggtagttatcgtgccgaaagacacagcccgtgatccgcatttgtaccggcagctgctgcaaagtgaaggcgtaacggtgctgaaccaaacgccgacggctttttccggactcattcatgaagaggccgggcatacggacaagctgaagcttcgatatgtcattttcggcggagaagcgcttcagcccggcatgctgaaaagctggaaagagaagtacccggagacggagcttgttaatatgtacggtattacggaaaccacggttcacgtcacatgcaaaaaactgaatatggatgatattgagagaaacaaaagcaatatcggcagaccgctggaaacccttcatgcttttgttatggacgcctatatgaatccgcagccgatcggaattcccggtgagctttatatcggcggggaaggcgtcgcgaggggatatgtaaacagggatgatttaaccgcctcccgtttcatcacgaatccgcacgtttccggcatgcggctctaccggacgggtgatatcgccaaaaggctctcaaatggcgagctggaatatgtcgggcggaaagatgcgcaagtaaaagtcagaggccacagaattgagctgggagaaattaaatcagcgctgcaagagctttcctccgtgaaagaggccgccgtgatcacacgtgctgatcagcacggtcagcactccatttacgcatacgcggtcttacacgggaacgaaaagataaaagaagcagagattcaggcctctctcagagcttttctgccggaatatatgattcccgcccgcttgatagcgcttgatgaactgcctttgacggcgaatgggaagctggacgagaaggcgctcccgcagcctgaattaaatgatagccttggaaatgatatcagcctgagaaatgaaactgaagaaatgatggctgacatttgggaagaactcttaggtgttgaaggcctcggtcccaatgctcatttcttccatctcggcggggattcgattaaagcgctgcaagtatgtgcgaggctgaaacagcagggctatgaaacgaccgtccgcgagctgttcgagcatcagacactgggagaagtatcgatgcggctccggaaagtccgccgcgtgattgatcaggctcccgtcacgggagacgttccgctgacgccgatccagcactggttcttgtcgcaatcattgccgcatgatcattttaatcagtcggttatgctccgcagtgcggacagaatcaatgaatctgctatgagaaaagcgttggcacagcttgcggttcatcatgacgcattacggatggtatgcggcacgcaaaacggatcggtgattcaatataacagagcggaaaagctttctgaagaagaactctttacgtttgaaacgcttgacgtgagagggaaagggtcattacaagaggagcacgccgcaattgaacaggcggccgcctgtattcaaacttccattcggctggagacgggtccgctcgtagctgtcggattatttcacgctaatgatggcgatcatctgctgctttccattcatcaccttgtcattgacggggtgtcatggcggattttatttgaagatctcaccgcatgctacaggcaggtgctcgaaggaaaagaaaccgcgcttccggcaaaaaccgattcctatcagacttacgcgaagcaaatctctgattatgctaaaagccgccggctgttacaggaagcagactactggtccgaaagagaaagagcggcggtcgaaccgcttccgaaagatgcccgcatctcttccaatcttctgaaagatacagatgtgatgaccgttacattgacgaaacaggagactgagcagctgttaacggaagcgaacagagcatacacaacagagacgggtgaattattgcttgccgcgttaagccttgcgctgaacagatggaccggaaacgagacattcaaaatcagcatggaaggccacggaagggaagagcacttggagcatcttgatatcagcagaacaatcggttggtttacgtcaatttatccggtattggttgatgcaagttttcaagatcaggctgatgacggcgagcggctcggctatcacattaagcggacaaaagacatgatgcgccgcattccgcataaaggagcgggatacggggtgctgaagtatataagcaaactctgggaagagactgaatccgattctcctgaaatcagttttaactatctagggcagtttgacagggagatccgttccagcggctttggtgtttctcccgtaaaagcgggaaatgaagtcagcccagactgggaacgtccgtacacacttgatatcagcggctccgtatcgtcggaatgtctcagcatgcatgtcgtgtacaaccgttttcagtatcaaaaagaaacgattgaagttttgacgggatattttcatgcctttctcaagcagatcatctcgcattgcacaggcaaagaggagcgtgaatggagcgccgctgatttcagtgacgaggagttaacgctggaagatctgagtgacattatgggagccgtcaacaaactatagaaaaggagtggcgcaatggggcagcaaccggaaatacaagatatatatcctttatcttttatgcaggagggcatgctttttcattctctgttggatcatgactcaagagcctacttcgaacaagcggtgtttacgatcaacggacagcttgaccgggaacgattccaaaaaagtatagatgctgtttttgaacgattcgatattttccgtacgacatttattcataagaatgtggcgaagccccgccaagtcgtgttgaaaaacaggccgagccgcgttcagtttcatgatatttctcatttggacgagaaggcacaagacaaatataccgaccggttcagaaaagaagataaagataaaggctttgatttgcaatcagaccctctcatgagagtctccattttgaaaaaagcgcctgaacgctatgtttgtatctggagccatcatcatatcgtcatggacggctggtgcttcgggattgtcatgaaggaatttctgatgatctatcaatctctgggagacgggcggctcccgtctctcgagcctgttcagccatatggtaagtatattaaatggctcatgaagcaggatcgtaaagaagccgagattttttggaaaacgagacttgccgatcttgagcaatcggcgtctcttccgaaaaaatccgcggaaccaaatggcgaacttgagcaggcggttttcaccatttctgaagagcagacaaatgagctgaagaacattgcggcaagggcgggagcaacgctgaatacagtgttccaggcactgtggggcatgttgctgcagcgtgtcagccgctgtgatgacgccgttttcggttctgtcgtttccggccggccgtcggatctcgcaggcgtggaaaaaatggtgggactgtttattaatacgattcccgtgcgggtgaaaagcggttcattttcttttctggagctcgtcaggcatttgcagcaggagacgctgcaagcagaagcgtacagctattatccgctgtatgacattcaagcgcaaagccctttgaagcaagcgctgtttgaccacattatcgtgtttgaaaatgtgccggcccagcgtgaaattgaaaatgtgagtcagtccggttcatttgattttgcggtagaagatttcacgatggaggaagtcacaaactacggatgcagcataaaggtgattccgggaaattctctttatatccgcttaaactttgataccggtatctacgacagcgtttttatgaagaatatcgaaacatttttacggcatatgatgaattcagtcatctccgatcctgaaatttgcgcctccgagatcgcattgcttgatgcgcgtgaagccagaagtatgctggatgcgtttaaccgtacagaaacggttgaaccgccggctccgacgcttcacggactgtttgcccgccgcgccgcgctttcgccgcatcgtccggcgctccgttttccgggcggtatgctgacgtacgccgagcttgaccagtacacagacagactcgctgtttggctccgccaaaaaggcgtccgcaaagaaagcatggtcggcgtgctcgctgaacgctcgccggagatggtggtttcagtgcttgccgtgttaaaagcgggcggcgcctacgtgccgcttgacccggagtatcctgaggacaggctgctctatatgctcgatgactgcggcgcttgtatcctgcttgcacagccggggttatccgtttccggtttttccggcgagacgcttgaagtgtctctttcttctctgacaggcgagacggagacaggggctgtctctgaagaagcggatagcgattcgctcgcttatatcatttatacgtccggttcgacgggaacaccgaagggagtggctgttgaacaccgtcaggccaccgcctttttatccggcatgcaagggcagttcccgttgacggaagaggatattatcgtgatgaaatcatccttttctttcgatgcttccatctggcaattgttttggtggacgatgtccggcgcctccgtgtatctgcttcctgccggctgggagaaagatcctgtgcggatgattgaagcgtttgcctcagaaaaggtgacgaccgcgcattttattccggcgatggtcaacagctttttagacgcgctggaaacagagcctgcggaaacaagaacacgcctcggcagaaccttgacacgcgtgtttgccggaggggaagctctttcaccgcttacggctgcccggtttgccgatcttctgccggagaccgtgctcattcacggctatgggccgacggaagcgacggttgatgcggcgttttacgtctgtgaccgaaaacgggacagcggacggacgcggcttccgatcggaaaacccgttcctggtgcccgtctgtatgtattagatagcggaggaaccatccagcctgcgggcgtggcaggagagctgtacatcgcggggacaggggtggcccggggctatctgaaccggtccgagctgacggaggagcgttttctcgatgatccgttttatccgggagagcgcatgtatcagacgggcgatatcgcacgctggacagaagacggcctagtcgaatggctcggacgttcagacggacaagtgaaagtccgcggctaccggattgaaccgggagaaatcgaagcggcgatccggcgcatcgacggcattcgtgaggcggcggtcaccgcccggaccgaacacggcgaaaccgcgctttacgcctatatcgaaggacgggaaagcgatgacgtgcgggcggagcttgcgacacgccttccggcctacatgatgccggctcagtttatagagatgagcgaatggccggtcacgccgagcggaaagcttgaccgccgcgcgctgccggctcccgacggagcggcagacagacaggcgtacaccgccccgcggaacgtcacggaaatgaagctttgcgccctttgggaagaggtgctgaaaaacggccccgtcggcatccgggatcacttttttgagcggggcggccattcgttaaaagcgacggctctcgtctcccgcatcgccaaagagttcggtgttcaggtgccgttacaagacatcttcgcccggccgacggtggaagagctcgcttcggtcattcaggacttggaggagagcccgtatgaagcgattcagcctgcgcaaaaacaggacacctacccggtgtcttcggcgcagaaacggatgtatgtgctccagcagcttgaagacggcggtgtcggctacaatatgccggctgtgctggaactgacgggcccgcttgaccgcatccggctggaggagacgttccgggagcttgtggagcggcatgagtcgctcagaacgtcctttgaaacggggcctgatggcgaaccggtgcagcgcatccatgacagcgtgccgtttcagctggatgaggccgagtcagctgacgcattcgtccggccgttttgtctggaggaagcgccgctcttccgtgcggccctcgtgaaagaatcggacgaacgtcatcttttattaacggatatgcatcatattatttctgacggtgtgtccgtcaacaccttgattaaagaattcggcgagctgtacgcaggccgttcgcttgcgccgatgcgccttcaatataaagactatgccgtctggcagcggtcatttcaggagaaagaagggtatcagaagcaggaagcctattggctgaagcggcttgaaggagagcttccggtgcttgagcttccggctgacaagccccgtccggctgtcagaagctttgcgggcggcagcgtatcgtgcacgcttgacgctgaaacggcatccggccttcaccgcatcgcccgggatcacggctccactttgtatatggtgcttctcgccgcgtacaatacgttactcgcgcgattgagcgggcaggaagacatcatcgtcggctcgccgattgccgggcgtccgcacaaagaccttgaaccgattctcggcatgttcgtcaacacgctcgccatcagaacggagccgaaaggaggcaaacggttcaccgattacttggcggaagtccgccaggccgcgcttgaagcgtatgagcatcaggactacccgtttgaagagctggtggagcggctcggcgtgcagcgggacacaagccgcaatccgctgtttgacgttatgtttgtgctccaaaatatggagcgtgaatccctggtgttaaataagctgcatttggctcaagctgcggatacaagtcataaaaccgcaaagtttgatgccacgctttacgcgtcagaagggtctgacggttccatcagctttgattttgaattcaatacagatatctatcaaaaacagacaattgaaaaatggctttcttattttacccgtattcttacaaaagtaattgaaaaccaagcgataccgcttggtgacattcacgtactggatgatgctgaaacaaatcgcgtcatttatcagtttaatcagacgaaaagcgattacccaagacacgaaaccatcagccgtttatttgagcgtcaggcaaaagaaacccccgatgcccgggcagttgtatatgatggacaaatcttgacataccgtgagctgaacgaacgggctaacagaatagcggcggctctccgatcaaatggcgtcggtccggaaagcgttgtcgcattattaaccggccgcacaacagagcttgcttccggaatcctcggaatattaaaagcggggggcgcctacttgcctatcggtgacgatgtgccgcgggaacgggctgaatggatgcttaaagactgtaaagctgatattcttctccaatctgataaacttgacggtctgccgctttcaggaaaacgtttattcatagaggatattcaaacaaaggccggattgagttcgggaaatcccgaaccgctcggaggacctgattcattggcctacatgatttatacgtccgggtcaacaggtgcgccaaaaggcgtcatgattgaacagcgaagcgtgatccgccttgtgaaaaacagcaattatattgattttacgccggaagatagactgttgtttacttcatcattaggatttgatgttacgacatttgaaatattcggtccgcttttaaacggcgcttctttatatgtaagtgaccaggaaacctatctcgactctgatgttctggaaacatttatacaacaaaacggcattacgacactgtggctgacatcgtctctgttcaaccatttatcagaacaaaatgaacacgtgttttccggattatcccgattgattatcggcggggaagcactgtccccgagccatgtaaaccgggttcggaatgcgctgccgcatctctcagtatggaatggatacggaccgactgaaaacacgacgttctcgacttgctttttgattgaacaatcatacgatcattcaatcccgatcgggcgccctgtcggaaattcaaccgcatatatcataaacagcaggggaacaccgcagccgatcggcgtcatcggcgaattgtgcacgggcggagacggtgtggcaagaggatatttcggccgccctgagctgacggaagaaaaatttgtccccaatccttttgttcccggagaacggatgtaccgcaccggagatttagcccgctggctgccggacggaacgatcgaatatgccgggcggatggatgatcaagtgaaaatccgcggttatcgggtcgagctgggagagattgaagcaacactgaggagcctggacggcgtgaaagaagctgtcgtgtcagtcagaaccgggcagtccggcaataaagaactgatcgcatatatgagtctgcaggcggacatggatacagaaaaagtgcgttcttcactgtctaagcaactgccgaattacatggttccggcctatatgatggaacttgagaagctgccgcttacgccgaacggtaaattggatcggaaaaatctgcccgaaccggagctcgcgcttcaaaccgcgtacacagctccccgcaatgagcttgaagaacagctttccgtgatctggcaggaagtgctcggcacaaaacaagtcgggattgaggactcattttttgaattgggcggcgactcaatcaaagcgctgcaagtttccgcacggctcggacgctatgggtggaaaatgacggcgagtgacttattccggcatccgtccattaaggagctcgcgcctcttatccggaaagcggaaagagttatcgatcagcggccggtggaaggaaacattccttggacacccgttcagcagtggtttttatcacagcggatggaaaacagaaatcatttcaatcagtccgtcatgatgttcagctctgacgcattgcataaacagccgctcaaagaagccttggagcatcttgtcattcatcatgatgcactccggatcaccgtcagtgcagaaaacgaaagtttcagacaaatcaatcacggtattcaaaaagatgaactgtacagcttggacatttgggatctgtctgagacagatacttgggaaagagaaatagaaactgaagtggctgcgctccaacagcggatggatattgaaaaaggcccgttattaaaagccggctggttcaaaacccggtccggggattatttattcatcaccgtacatcacctggcggttgacggagtgtcatggcgtattttgctggaggatttatctgccgcttacactcaagccgtaaaaggtcagccggtccagcttccgccaaagaccgattcgtttaagcaatacgctgaaaggctttcagaatacgcaaaaagcagcaagctgatgcgtgaagaagaatattggcgttttattgaagaagaaacagccgccgaacttccttatgaaaaaccgcagcatcagactggagccgacagcattcggcaaacggtaagctttacgcttacagaagaagaaacgtccgttttgcttcagcaggtcaaccgggcctaccataccgatacgcaagatattcttctgactgccgcagctttggctttacgggactggacagggggcggcagactgcgcatcgcgatggaagggcacgggagagagcacatcatgccggagctcgacatcagccgcaccgtaggctggtttacctccatgtatccggtgctcattgacttgaacacagcaggcgctgagcttggaacgtcggtaaaaacggtcaaagacacactcggaagaataccggataaaggaataggctacggcattttaaaatacatgacaccgcctgaacaaaaaacaatccgcttcagacaagcgcctgaaatcagctttaactatttagggcaattcaatgatacagaagatcagcacacgttcagtctgtccggtcttgcaagcgggcacgacatcacgccgacatggcagcgggaacaagcggtggaaatgagcgcgatggccgcacaaaacaaacttcacttcagtttgagctatccgccgagccgcttccgcaaagaaacgatggaacagctgctgcaaactttacagcaatatttgcgtgatattatggcgcactgcaccggcaaagaggaagcagaaaaaaccgttagtgattttagcagcaaaacgttaacatctgatgatttggacagcatagcgagttttgtcgaggaactgtagaaaaaggcgacggggagattataacatgacaaaaaagaatgcaattcaggatatttatccgctgtcttatatgcaggaaggaatgctttttcattccctcctgcaaaaggaatcacaggcttacgccgagcaggcctccttttcaataacggggaaggttgacacccgcgtgtttgaagagagcgttcatgcccttttcgaaagacatgatattttcagaacgatctttatcagccagaacgtgtcagtgccgcagcaggtcgtattaaaagagcggaacgtcagcatcattgaggaaaatctcaccaatttaaacaaggctgatcaaatcaagcatattgaagaagccaaacgaagagaccgtaagaaaggatttcatctgcaaaaagacatgctgatgcgggtgacgctgcttcaaaccggtgaatgtgaatatacgtgcatatggagtttccatcacatcattatggatggctggtgtctcggaatcgtgctgaaagagttcttccagatatacgcctcgcggctccgccggacaccgttaacgcttgagcccgctgtgccgtacgggacctacatcaagtggctgatggagcaagataaagaaaaagccgcttcgtactgggagcggtaccttgaaggctttgagcagcagactgttctgccgaagcagaaaaaagccggcgaaagcagacaagaggaagtgacgttttccttttcaaaagaggacacggctaagctgaaagagctggccgtaaaagaagaggtcacgctgagcaccattttccacacgctctggggcattttgcttcaggcgtataaccagacagaagatgcggtttttggttctgtcatttccggaaggccgtctgaaatcgaaggcatcgagcgaatgatcggcctgtttattaataccgtgcctgtccggatcagcggggcaaacatcccgtttcaaaagctgatcaaaaatgtgcaaaaggatgctttgaaaggacaggcatacagctatcatccgctttatgacatacaggcgaattcacaggtaaaacaaggcttaattgaccacattctcgtctttgagaattatccggttgaacaggagcttgatgtgctgaacagcaagggggacacgaaagacctttttcacatccatgatttcagcatggaagacgaaaccaattacagtttttatcttatggtggcgccgggtgacgaaattcatttgaaaatgagatacgattcaagcatgtatgaccgccaatttattgaaaatatcaaaggccatttggcgcatatcgtctcccaagttctcgacaaaccggacatcacgccggacaagcttgcaatcatcactccaggggaaaaagcgcagctgcttgcgccgatttctgaagagaccgaaaagcctgaatatgacacggttcatgcaatgtttgaacggcaggccgcaaaaacgccggatcaaatcgcgattcggtatgaaggcgagtcagtgacgtacaaagagctgaacgaatcggctaataagctggcccgcctgctgcaaaagcgcggattaaagcgggaggaaccggtaggcgtcatgctcggccgttccccttctttagcggcggctgttctcggtattttaaaagcgggcggcgcctttgtcccgatagatccgggcagtccaaaggagcgtatccgatatgtcattgaaaacagcggctgcgtccatgttgtaacagagcggcatcagtcagtccccgcggaacaaacgctgcaagttacatacatagaagacgccgggacggaagcggacggaagcaatgtgcaatccattaatacggcggacgacctcctttatatgatttatacatcgggaacgacagggaaaccgaagggtgtgctgctcgaacataaaaatatggccaacctgctttctcaccaattgacgaacacagacattgatttttgcacaaatgtgctgcagtacgcatctgtggcgtttgacgtctgctatcaggagttattttcagtactcttgagcggcggcaccctttgtatcgtgcccgaatcaatcaaacgagacgtttctcagctgttttcgtttattgatcagcacaacacggaagttgtgtttttcccgactgcgtttgtcaaaatgcttttcaatgaagaaggttatgcacagtcttttccccgctgtgtgaagcatgtcattacggccggggagcagctgaccgtttcgcgtttgttcaggcagacgctccgtttacacggtatgcatctgcataatcattacggcccgtcagaaactcatgtggtttcaacgtatacgatttctgcgggagatgacatacctgaacatccgccgatcgggaaaccgatccatcataacaaaatgtatattctcagcaaaaacagacagcttcagcctctcggaattgcgggagaattgtatatttccggggcgaatacaggaagaggctatgtgaacaatccggcgctgaccgaagagaaatttttgccggatccgttcagaacggacgccgtcatgtaccggaccggagatttggcaagactgcgtgcggacggccaaattgaatacatcggccggacagatgatcaagtgaagatcagagggtaccggattgaaccgaaggaaattgaaaccgtcctggcaaatcatcatgccgtgaaagaagctgctgttctgattcaaacgaatgagtcgggcgaaaatgaattatgcgcctactgcagcgtctcacaagcgactgatccttctcagttgcgaagagatttggcgaaagagctgcctgattatatgattccggtcaaatgggcttttgttgactcaattccgctcactgcgaacggaaaagtcgatcagcgggcccttccggaagcttcggcgtacgccgcaggccgtcaatatacagctccccggaatgtgacggagctgaagcttacccgcatatgggaagaagtgcttcaaagcggaccgatcggcgttcacgatcactttttcgagcttggcggccattcattaaaggcgacggcactcgttgcaaaaatagctaaagagtgcagtgtgcaaatcccgctgagcgatgtcttcagccatccgactgtagaagaactcgccaaaatcatcagtgaagcagaagagaacccgttcgcatccatagaaaagacagaaacgaaagaaacatatcctgtctcatccgcccaaaaacggatgtacgtccttcaccagcttgaaaatggcggtgtcagctataacattccagccgttttagaggtgaaggggccgtttgaccgagacaggatggaagccgtgttcaaggaactgatccggcggcatgaaccgctcagaacgtcctttgaagaaaaaaacggcctgcccgtgcagaggattcatgacgacgtgccatttgcatttacagaagaacaatcagccgaagcgtttatccggccgttcgatctcggcaaagcgccccttttccgggcgggatttgtccaaatagaaaaagaccggcatctgcttttagctgacatgcatcatattatttcagacggcgtatccgtcaatcttttgatacgtgaattcagtgagctgtatgctgagagaagtctgccgccgttacggattcaatacaaagattatgccgtctggcagcaatcatttatggcgggcgccgcatatcggaaacaagaggagtactggctgaaccggcttgccggtgagattcccgtgcttgaattgccggctgataagccgcgtcccccggtgcggagcttttccggagaccgggtgtcatttgtcatcaatgaaaaacatacagcacagttgaaaaagctggcgaaagaaaacaaatgcacactgtatatgacgctgctcggtgtgtacacggttctgttagcccgtttaagcggacaggaagatatgatcgtcgggtctccgattgcaggaaggcctcatgccgaccttgacgccgttctgggcatgtttgtcaatacgcttgctttcaggacgcgtcccgacggaagcatgacattcaaagaatatttaaaggaaattcgccaaacagcgcttgaggcttacgaacatcaggattacccgttagaagagctcgtcgataagctcggtgtgccgcgggacatgtcccgaaatccgctgtttgacacaacatttgcgctgcaaaatatggaacagcagaagcttagggcagccggacttgaactgcagccggcagacgtcagcctgccgatttctaaatttgacttatcgctgtacatctctgaaaacgccggtgaattatactgccagtttgaatacagcaccgatttgtttaagagaaaaacgattcaaaaatgggcgggattttttacgacacttgccgaaaacgccgcggctgatccgggcttggaattagacgatatttctgttttgacagaaaaagaagaagcgtctctgcttcaagatttcagccccttgcagaaaacagcgtttccgattcatcagtctcttcatgatctgctggaacagcaagcggaaaaaacgccggaccgtccggcaattttaactgatgacatttcgattacgtatcaggaactgaacgaaagggcaaacgagcttgcgcaccagctgatcaagcgcgggataaggctggaggataaaactgccattatgggccggcgttctcctgacatgatgatcggcatttacgctgtcttaaaagcaggcggtgcatatctgccaattgatccggattacccggaagagcggattcgctttttactgaaagacagcggcgtgaaattcttactggcagaaccagaacttttcgcaccagatctttttgagggagaaacgatctctctgaaaagcggacaaacagggaaccctgaagctgcggccaaccctaacgttccggtaaaccctgattcattggcttatatcatctatacatccggttctacgggacgcccaaaaggcgtgcaggttgaacatcggtcagccgtaaactttttatactcactgcaaacacgttatggattaagtgattctgacatcattttgcataaaacatcatactctttcgacgcttcgatttgggagctgttttggtggccgatcgcgggagcttctgttttcctccttccgcaaggcggcgagaaagaccctgaaatgatactgaacgcattggagaataaccgcataacggcggctcattttgtgccatccatgcttcatgctttcttggaatatataaattccagaaaacagccgatcaaaaaaacctgcttaaaaagggtttttgccggcggcgaacaactgggcccgcacctggtttcccgtttttatgaccttctgccgggaacggaattgacaaattcctacggtccgacggaagcgacagtagaagcggcgtactttgatttgccgcaaggaaaagaatttcacaatgttccgatcggcatttccgggcataacatgcggctttatattttaaatcaaaagaaacagcttctgccgccgggctgtatcggagagctgtacatcgcggggacaggggtggcccggggctatctgaaccggcccgagctgacggaggagcgttttctcgatgatccgttttatccgggagagcgcatgtatcagacgggcgatatcgcacgctggacagaagacggcctagtcgaatggctcggacgttcagacggacaagtgaaagtccgcggctaccggattgaaccgggagaaatcgaagcggcgatccggcgcatcgacggcattcgtgaggcggcggtcaccgcccggaccgaacacggcgaaaccgcgctttacgcctatatcgaaggacgggaaagcgatgacgtgcgggcggagcttgcgacacgccttccggcctacatgatgccggctcagtttatagagatgagcgaatggccggtcacgccgagcggaaagcttgaccgccgcgcgctgccggctcccgacggagcggcagacagacaggcgtacaccgccccgcggaacgtcacggaaatgaagctttgcgccctttgggaagaggtgctgaaaaacggccccgtcggcatccgggatcacttttttgagcggggcggccattcgttaaaagcgacggctctcgtctcccgcatcgccaaagagttcggtgttcaggtgccgttacaagacatcttcgcccggccgacggtggaagagctcgcttcggtcattcaggacttggaagagagcccgtatgaagcgattcagcctgcgcaaaaacaggacacctacccggtgtcttcggcgcagaaacggatgtatgtgctccagcagcttgaagacggcggtgtcggctacaatatgccggctgtgctggaactgacgggcccgcttgaccgcatccggctggaggagacgttccgggagcttgtggagcggcatgagtcgctcagaacgtcctttgaaacggggcctgatggcgaaccggtgcagcgcatccatgacagcgtgccgtttcagctggatgaggccgagtcagctgacgcattcgtccggccgttttgtctggaggaagcgccgctcttccgtgcggccctcgtgaaagaatcggacgaacgtcatcttttattaacggatatgcatcatattatttctgacggtgtgtccgtcaacaccttgattaaagaattcggcgagctgtacgcaggccgttcgcttgcgccgatgcgccttcaatataaagactatgccgtctggcagcggtcatttcaggagaaagaagggtaccagaagcaggaagcctattggctgaagcggcttgaaggagagcttccggtgcttgagcttccggctgacaagccccgtccggctgtcagaagctttgcgggcggcagcgtatcgtgcacgcttgacgctgaaacggcatccggccttcaccgcatcgcccgggatcacggctccactttgtatatggtgcttctcgccgcgtacaatacgttactcgcgagattgagcgggcaggaagacatcatcgtcggctcgccgattgccgggcgtccgcacaaagaccttgaaccgattctcggcatgttcgtcaacacgctcgccatcagaacggagccgaaaggaggcaaacggtttactgattatttggcggaagtccgccaggccgcgcttgaggcgtatgaacatcaggactatccgtttgaagagctagtggagcggctcggggtgcagcgggacacaagccgcaatccgctgtttgacgccatgcttgtcgtccagaatatagagcatgaggaactgctgttggacggtttgcatattcagaatgcggacgtgtcccgtccggtttccaaatttgatgtcactttgcaggcttctgaaggcgggggacagattcattttctgtttgaatatgcggcgtctttattccggaaagaaacgatgcagcgctgggcttcccactttatgacgatgcttgaacacattgtccgtgaaccggaaacttctttacaagcgatcagcatgctgactgctccggaacggaaccggattctttcagactttaacggcatgacggatcaacagctgcctgaaaaaacagttcatgaactgttcatcacccaggcgcgaaaaacacctgatgccgcggcccttatcagcggggaaacattgatcacatacaaagaattagatgactggtcgaataaaatcgccagagccctgcaaaaacggcagatcggacctgatgcagccgtcggcattgtgataccaagatcgccggaacaagtagcggcagtcttcggggtttggaaagccggaggagcttacgtcccgatagatcctgaatatccggaggaacgcaagcaatatatcatctcagacagcggcacagcgcttctccttaccgcacacggtgcgatagaacaagtgcctgatcgttttaacggtgaagtgctcgcactggaggatattcaagaacaggatgcttcgccggtccagtcattatcagcaccggaagatttggcttacatcatttatacatcgggaacgacaggcaggccgaaaggggttatggtcgaacatcgatccgtcagccaaacccttcaatggcggagcggattttatgatctgaatgagaaagatacgattcttcagctcttttcattttcatttgacgggtttgtaacaagcatgttcacaccgctgatttccggtgcgaaagcggccgttttagccgaagatgaagcaagagatattcttgctattaaacactatcttgcatcttaccgcatcactcacatgatcattgttcccgtactgtaccgtacactgcttgacgtactggagccgggggatgcagagtctctcagaattgtcacattagcgggagaagctgtcgaccaaaacattatcagccgcagtttatcagtttgtccacacactgagcttgccaatgagtacggcccgacggaaaacagcgtcgccactacagcggcaagacatatagaacaaagtaagaacatcacgatcggccgtccgattgagcattcacacgtttatattttaaacggagatcatccgcagccgatcggtgtaacgggagaactttgcatttcgggttccggccttgcaagagggtaccgcaatcttcctaagcaaacggcccaagcctttgtccaagacccgttccagaagaaccggcgcatgtaccgcacgggcgacctggcaaaatggctgccggacggcacgctgcagtatatcggccgaatggacgagcaagtcaaaatcagaggctaccgggtggaactgaaagaaattgaatccgccttaacaggcataaaaggagtcaaagaagcagccgtcaccgctctgcccgcatcagcaggccaaacggaactatgcgcttatatcgtgacagaagaaggaacagaaagtgaaactgtgcagcaagcactcagaaatgaaatgcccgcttatatggtgccggcgttctttgaaacacttgaagccctgcctgtcacaccgaacgggaagcttgaccgccgcgcgcttcctgagccgcggaaaaaagcgcacaccggacgggcatttaccgagcctgaaagcgacatggaaaaagagctgtccgcgatttggagcgaagtgctcggaactgaaaacattgccgcggatcaatcattttttgaactgggcggcgattccattaaagccctgcaagtatcagcccgattacatcaggcaggaaaacagatcgccgtaaaagatattttcagccggccgacaattagggagctggcgccttatgtccgtacagagcggcagccggtcagccaagctcctgcagaaggagaagtgaagtggtcgccgattcacaaatggttcttcacacaagacatgaaggaagcaaatcattttaaccagtccgtcatgctgacgagagcaaattcaatagatgaagaggctctgaggaaaacgttaaaagccattaccgttcatcatgatgccttgcgcattgtctgcaaaaaagacgaagagaaaggtcttctcctcttcaacagaccggctgacctcgcagatgagcagctttacagcctgaccatattagaaatggaaggcgatgagcatgagaaggaacgttttgtaaaacgccgcgtcgcagagcttcagagaaacatggatttagagaacgggccgctggtacaggcggggctgttccgctctgaagcagaagattacttgtttctgacggtccatcatctcgctgtcgacgggatatcatggcggattttattggaagacttggcttctgcttatgaacaggccgtctctggacaggaaatcaaactccctccgaaaaccatgtcattcaaaacatatacggagcagctggccgattatgccgaaagtaaacagcttcttcagcaggcggagtattggcgggagattgaacactatgaaacagaaagtcttccttacgaacaggcagatttatctcaaactcctgcaaaaaaacggaacacggtatccttcactctgacagaaagtgaaacggacgccctgttgaaagatgtgcacagtgcctacaatacggatacgcaagatgtgcttttggcttccgccgtgcttgccattcaaaagtggtcgccgcggcacgctttgaaaatcgcccttgaaggacacggacgccaatcagagcaggcaggtgcggacatcagcaggacagtggggtggttcacttccatttacccggtgcttttccggagcggagtttatgaacctcttgaagaatatgaaattcgcacattgaaatccgtcaaagacacattgcggcgcattccggataaagggaacggatacggcgtcctcaaatatttaacaccgccgaagcttgccgggatgactttcgggaaagcaccggagatcagctttaattatctcggacaattcgatgcgcccggcgggaacccggcagaaacggaacagcctgacgcgtttcagttttctcctttgggaggcggagatgatgtgacagatacatggaaacgggagcagtcacttgaaatcagcgcgattgcggcaaaaggccggatgaccgtcagcatttcctatgaaacggagcgcttccggcaagatacgatcgaacggctgtccgaaagctgccggtattatctcctgaaactgtcggaacactgcctcagcaaaaccgatacggagaagaccgtcagtgactttgatgatcgggagctgactgaggaagcattgcaggatattgccgacttactcagcttccactaaaccgagcgggaggaacacatggacaaaacaaaaaatatccaaaatatttatcccctcagccgaatgcaggaaggaatgctttttcattcctttctgcaaaaggagggggctgcatatatcgagcaatccgtcttcaccataaaaggccggcttcgtccggaattgtttgagcaaagcgtacagtctgtcatcagccgtcacgatattttcagaacggtttttttacctcatgtcgctcagctgaacggcccccgccaagttgtgctgcgtgagcgggaattccggctgcaccgcgaagatcttacacatttggacgaagcggaacagagcatctatttacaacgatttaaggaacgtgaccgcttaaaaggctttgacttgcaaaaggatatgctgatgcgcgtttctttgtttaaaacggctgacgaaaaatatgtatgcgtctggagtcaccatcacatccttatggacggctggtgcctcggcatcgtccttcaggaattcatgcatatgtaccgggcgattgaatcaggctcacctgtcacactggcacccgcaaagccttacagcacttatattacatggctgactgctcaggacaaagacgcggcttctgagtattggaaaggatatttagcaggctgcgagacaccctcaggactcccgaaaatatcggcccgtccccaggaaaaaggctaccgcaaggaagagctgctgttttctatagatcaaaacctgacggacaagctgaaaaccatcgccaaagaagagggcgctacgctcgcagttcttatgcagactgtatggggccttatgctgcagcgctacaaccggacggacgatgccgtattcggcgccgtcgtatcagggcggccttccgtcattgacggcgtggaaagcatgatcgggctgtttatcaataccgttccggtacgcattaaaacgggtgacgaaagctttagagaactgctgggccgcttgcagaaagaaatgcttgactcagaggcgttcagctatcatccgcttgctgacatccaatcgcagactgagctgaaacaggatttaatcgaccatattatcgtgtttgaaaattatccgattcagcagcagatgaaagacgcggaaaaggaatcggatgcaccattccggatcgggaatgtcaacgtttcggaacaatcgggctacgattttaacctcatcatagcgcctggcgatgagctgctcatcaaattcagctacaatgcgaacgtttatgacgaagtatggatagagagcgtaaaaggacacttggaagaagctctgcgcggcgccgccttcaatcccgatgttcccgctgatcggcttccgatgctcggacaaaaggaaaaatcaagaataatcggcgaatttaatgacacgaaaacaacttatgaaagagatgaaagcatcatcagcctgttcagccgacaggtgaagaaaaccccggaccatcaggcgcttcacgccggcgggctgacgatgacgtaccgggagctcgatgaacggtcaactgcattcgcccgcaccctgctggaaaacggtctggcgccaaagggaattgccgggattctggccgaacgctcaccggaatttatcatcgctgttctcgctgtattgaaagcgggagggacgtaccttcctcttgatgcagaactgccaaccgacaggatcgccgatatgctcactgagagcggagcacagctgttaacggtacaaaaaggaattgagactgacattgacttttctcacatcatctctatcccggctgcagctgaaaaacaaacacctgatgcgggaaaactgaataccgatacagcacctgatgaccttgcctatattatgtatacatccggttcaacaggaaaaccgaagggcgtgatgatttccaaccgaaacgtcgtatcgctcgtgtcaaacagcaattacacgtcggctggcatgtcggaccgtctcattctgacagggtccatcggttttgatgcagtgacgttcgaaatcttcggagcgcttttgaacggagcatgtcttcatgtggttgaccgctcgacaatgcttgcccctgagaggttcggcaattatctttcttccaaccgtattacgattctgtttttgacgacggcgctctttaaccagttcgcccaggcagatccggagatgttttctgggttgcacaccttatatgtcggcggagaagcattgtccccggcgctcatcaataaggtcagacaccgctgtccgaatctcagcctttataacatatacggaccgacagaaaatacgacattttctaccttttacgaaatcaggcacgatttttctcagccgatcccaatcggaaaaccgatcagcaattcaaccgcgtatatcattgataaaaatggcggacttgcgccgatcggcgtgcccggtgagctttgtgtcggcggtgacggggttgccaaaggctatttaaacaggcctgacttaacaagtgaagcgtttgtcagccacccggttcatcctgaagaaaagatctacaaaacaggcgacttggcacactggctgcctgatggaagcatcggatacatcagccgtatcgaccgccaattcaagattcgcgggaagcggattgagccggccgaaatcgaagcgcgcttgactgaaattgatggaatcagggaagcggcagtcatcgtgtcagacgaaggacaagaagcaatcctttgtgcgtattatacaggcgcacatgttgaagaaagagccattcgatccctgttggccaggtcgcttcccgactatatgattcctcagtatgtgatgaagcttgaccgtatgccgcttaccgcaaacggcaaagtggaccgccgcgggctgcctgcgccagaacggaaaaaaacgtcatcaaaagccgttccgccacgaaactgggtagagcgtgagctgatcgacatttggacgccgatcctcggctgcagggagatgggcatacaggatgacttctttgagctgggcggccattctttgaaagcattgcaagtgattcatcagctgaagaccaggcagcagatggatgtgccgattgaaatgatatttgaatatccgacaattgaacaattggctgaaaagctgtattcaaacacactgacagaagctgcagagcagcatatcagcagactgaaccagtcgaaaggccgcaatcttttctgttttccgcctatctcaggtttcggcattttctttaaagatcttgcggcggcattaaatggacgggctgctgtgtacggttttaactttattgaagaagacagcagaatggaacaatacattgataaaatgctggaaatccagccggaaggcccttatatactcttcggatattcggcaggcggcaatacggcattcgaggcggcaaaagcgatggaaaagcgcggcttagaaatcagcgacgtcattatcgcagacgcgtacagaaagcttgacacattgccgccgcagccaacaaacgcaacagccgaaaatgtcccggaagccgtcagggaagcggtcatccgaaaaacagagcgctatcaaacgtactgggcggaactgataaatgacggccaaatcgcggcaaacctccattttatcgaggccggcataaaggaagagcacagtgataagaccgagccgatgaaatgggaaggcgccacaacgggactctatcaggaatatcaaggcgggggcgcccataaagatatgtttgaacccgcctttgcacagcagaatgctgaggtcatactggacatcattgcaaacagcggaagacgcttggcgcggaatctgtaacatccggcagaatggttcagtatgacagagggcaagataggggaatcaaaccagtttttttggaggctttgacatgacgaacctatcttggcttacgtatgtaatgatcattcttgccagctaccggctgacccatttgatcgtatttgataagattacggaattcataagaaaaccctttataaagcaagaaaaaaccgtcgatcaaaacgggcgcgccgtccaaaaaaaagtcccttcctccgcattcggttatatgctgcaatgttattggtgtgcgggcgtctggtgcgccatattgatcggcatctgctacttggtctggccccgctatgcacatccggttattttcattttgtccatcgccggagcgcaggccattcttgaaacgtgtgtcggcgtcggaacgaaggtcattgacgtgctcgccgctatgaaacataaaaagtcctgaagcgttttgattcgctttaggacttttttctttcccttttaggctgagaggagcaaagcaggctttctgattcaccgcccggaatgcttcggaataccgtaaagcagagagggggaaaaacatgaaaagctgccgttttagcatgatatggtttttggccgttgtactgacagccggcatctttacattctcagcatccgcacaagcaagcggcactcagccggagagagaaatgagagccgtatggatcgcgtctgtcaccaatatcgactggccctctaaaaaagggctgtcaccggaagagcaaaaaagagaatacagcaagctgctggatgacgttcaggagatgggaatgaacgccgttatcgtccaaattaagcctgcggctgatgctttttatccatcagattacgggccttggtcagagtatctgacaggaacacaaggcaaaaatcccggctacgatccgcttgcttttttagttgaagagacacataaacggaatcttgaatttcacgcttggttcaatccttaccggatcacgatgaatcacacaaatttgaatgcgctttcagatgatcatcccgcgcgttcgcatccggactgggtcgctgcatacggaaaacagctgtactacaatccgggcattccggaagtaagacaatttataacggatggaatcaaagaggtggtcagccgttatgacattgatgcggttcatatggatgattatttttatccttataaaattgccggacaggaattccccgatcaggcggaatacgaacggtacggaaaagctcactttgcatcagttgatgactggcgcagggataacgtcaaccggcttgtaaaagaaatcaaccaaaccatcaaacgagaaaaaccttatgtcaaattcggaatcagcccgttcggcgtatggagaaatgccgcagatgacccgacaggctccgaaacggccgcaggggtgcggaactatgatgatttatatgctgatacgagagaatggatccaaaaaggatacattgattacatcgcaccgcaaatttactggagcatcggatttaaagcggcggcatatgacgtcttagcggattggtggggaaaagaagtgaacaatcggccggtgcatttatatatcgggcaggcagcttataaaatcaacaacaacgctgatccggcctgggccgacccgggggaatacggaaggcagattactctaaacaggggatcagcatggataaaaggcagcatgcatttcagtttaaaggatttaaaccgtaatccgctcgatgtaaaaaaccgtttgatcaaagacatgtacagccggcccgcattaattcccgagatgccttggctcggacattccgctttaaaaaaaccggctgtcaaacgggcggagaagaacgcttcaggccatacactctatatcgaagatgcgaaatccaacggtaaaaaaacggcttattacgccatttaccgcgcagaaaagggaaagcagccttatttagtggatacagtcagaaaaacatcgtcacggacgcagacattttcagatactgatattcgggcgaaagaagcctgcacctatttcgttacttccgttgacaggcttcaccatgagagccgtccctccgcaaaacggacaattaaatagccattattaataaaactgaccgttgcggcgctgtcagtttttttgcagcggatgagtccgaatgttcagactttatttggatggaatgaataaagacccccattaataaaatgtagaaagcagcagaaggaggaaggttaatgaattttcaactgacaaaagaacagcagatggtgcgcgaaatggtcagagatttcgccaaaaatgaaattgccccgaaagcccatgaggttgatcaatcggccgtcttcccgatagacacatttaaaaaaataggcgaactcgggctgctcggaattccgtttccggaagaatacggcggggcgggcggtgataccatttcatatgcagcagcggtcgaagaaatcggaaaagcctgcggcagcacggggctgagctacgcggcggccgtgtcactcggcgcaagcccattatactatttcggtactgaccaacaaaagcaagaacatcttattccgcttgcttcgggaaaagcgctcggatcattcgggctgacagagccgaatgccggttccgatgccggcggaacccagacaaaagccgagaaaaagggcgatgactatgtgataaacggagagaaatgctggatcacaaacgcaaattacgcccgcacggtcattgtcaccgccgttacgggaaagaactccgccggaaaaccgatcatttcagctctcatcgtcccgacagacacaccgggatttacgatcacaaatccgtacgacaagatgggtgtgagagggtcggatacggccgaacttgtgctggaggatgtcagggtgcctgccgataacctgctcggtgatcctgaaaaaggttttaaacaatttttatatacattagacggcgggcggatctcgattgcggcactggctgtcggtatcgctcaaggcgcactggaggcatcgctgtcatatgcgaaggaacgcaagcagttcggcagtccgatatcgtcatttcaagccattcaatttaagctggccgatatggcgatggaaattgaccttgccagacagatggtgcttaaagcggcatggctgaaggatcaaaacctgccatttacgaaagaagctgcattcgccaagctttatgcttcagaaatggccgtcagaacatgccttcaggccatccaaattcatggcggttccggttatatgaaggaatgcggtgtcgaacgtatgcttcgtgacgcaaagctgatggagattggcgaaggaacgtcagaaattcaaagaatggtcatcgcaagacagcttttgaagtgaaatgaaaacgtttactaagacagggatggaagggggcaggtcatatggctgaacttatccatttaacagccggaaagctgcttgagcggaccgcggagctttttccggatcgtgaagcggttgtttaccctgagcgcggccttcgttatacgtatgccgagtttgaccggttatgccggcaaaccgcaaaagggctgatgaagctgggagttgaaaaaggagatcatgttgccatatgggcatccaacattccggaatggctcgcggcgcaatttgcaacggcgaaaatcggcgccgttctggtcaccattaataccaattttcaaatcgcagagctcgattatctgctggcacattcagacgtctcggccttgataatcatggattcctaccggcagacatcttatgttgagatggtgaataagctaattccggagctgaaaacttgtgagcgcggcaggctgcgttcgaaacgttatccctttttaaggacggtgttatatatcggtgataaaagcctgcccgggatgcaccgttgggattcattgctggataatgccgaagctgtaacggatgcagcgcttgacggaaggatggacagcctgaaaaaggatgattgcattcatatgcaatatacatcaggtacgaccggatttccgaaaggcgtcatgctctcacattttaatatcgtaaataacgcggccaatatcgcagaatgcatgaagcttacttcatgtgaccgtttatgtattcccgtgccgtttttccactgctttgggtgcgtgctcggcgtgctggcatgtgtttccgcgggtgcggcgatgattccgatcgaacagttttctccgccggccgttctgaaaacggtggagcaagaagcctgcacggctctgcacggtgtaccgacgatgtttatcgccctcctaaatgacagccgtttttctgaatatgatctttcccacgtccgaaccgggattatggcaggctcgccatgcccggcggaagtcatgagagaagtgatcggcaaaatggggatgactgacattacaattgcctacggacagaccgaagcatcacctgtcattacgcagacaagaacagatgatccgtttgaaagaagagtggaaacagcggggcgcgcgcttccccatatcgaagtcagaatcgttcggcccggaacatccggagaagccgccaggggcgaacaaggagagctctgcacccgcggatatcatgtcatgaaaggctattataaaaatcaagaagcgaccgaagaagcgatagacaaagacggctggctgcataccggtgatttggcggtcatggacgaggacggatactgcaaaatcacgggccgtctgaaagacatgctgatcaggggcggcgaaaatatctatccgcgcgagattgaggaaatgttatatcggcatcccgcagtggcggacgttcaggtcgtcggcgttcctgatccgaaatacggagaagaggccgcggcgtggatcaggctcaaagacggacaaaccgcttccgcagaagacatcagaaccttttgcaaagaacatatcgcccgctataaagtccccaggtatgttttgtttacagatgaatatccaatgacagcctcaggaaaaattcagaaattcaagctgcgggaaaaaacgattgaagagctcaagttaacttaatgaaaaaggagtgcttcacatttgtttaaaaaagtcctgattgccaacagaggagaaatcgccttacgaattatccgcacctgcaaacgtctcggcatcccctcggcagctgtgtattcagaagccgaccgggacgcgctgcatgtaaaagcggctgatgaggcctatccgatcggtaaatcgagagtaaatgaaagctatttacatatcgacagaatcatagaagccgccaaatccgccggagcggacgccattcatccgggctacgggcttctgtcagaaaacagcctgttcgccgaacgctgccggaaggaacaaatcacatttatcggtccgcccggtgatatcatcgccaagatgggcagcaagattgaagcccgaaaaacgatgcaaaaagcaaaggtcccgatcgttcccggtgtttcagagccattgcccgatgttcactccgccttagccgaagcccgtgccatcggttttccggtcatgctgaaagcgtccgcaggaggaggcggaatcggcatgcagatcgtacattcagaagaagagctggccaaagcgttcgaaggaaatcaaaagcgggccgcgtccttttttggagacggcgcaatgtacatggaaaaggtcattgaaaatgcccgtcatattgaaattcagatactcgcagattctttcggcaacaccgttcatctgtttgaacgtgactgttcagtccaaaggcgccaccaaaaagtgatagaagaagcgccgtcgccgtttgttgacgatgaattaagacaaagactcggtgaaaccgccgttaaagccgcaaaatcgatcggctaccaaaatgcaggcacaatagaatttctcgtcgaccaaaagaaacaaatctattttttagagatgaacaccagactgcaggtggagcatccggtgacagaagaaattacaggactggatcttgtggaagaacagctgaaaattgccgctgggcaggcgctgcctttctcgcagaaagatatcaaccactgcggtcatgcgatagaagtgcggatttatgcggaagatccggtcaccttttacccgtctcccggtaccatctcgtctttttccgttttaagacacccgtcagtgcgacacgaatgcgccgtcgaaaagggaagcgtcatttctccgttttacgatccgatgattgccaaaatggtcgtcacggcgaatacgagaaaacaagccattgaacaactgaaaaccgcccttggcgaatatcatgtagaagggattaaaaccaacattccgctgctgacaaaaatttcccattcagaagggtttgaaaagggcgaggcaacaaccggttttttacaaacaatgaacgagggggcgtcaaaatgagcgtcataaaaattcaaatggcgggaaacctgtggaaaattcatgtgaagccgggtgatgtcattgaagaaggacaggaagtggccatcttggaatctatgaaaatggaaattccgattatcgctgatgcagcgggtacggtgaaagaagtgaaaaaatcagaaggtgatttcactgatgaaggagaggtcctgattgaacttcaataaaacgggaggtgcagcatgaactgtccgaaacatgtccgcatcaatgaagtaggaccgcgtgacggcttgcagaatgaatcggcgtgggtggatacagaagataagattgagtggatcaatatgctgtcaaaaacaggtcttccctatatcgaagtgacatcattcgtgcatccgagatggattccggctcttcgtgacagcctggacgtcgcaaaaggcattgccagatctgaacatacggtctacgcggctctcgttccgaacctcatcggactggagcatgcggcagaaggcggaatcgatcaggcatgtgtatttttatctgcaagcgaaacccataaccaaaaaaacgtaaacaaaccgattgaccggaccgttcaagagctcaggcgggttattactgaagcaaaagctgaaaaaatggcgacgagagcttatctgtccactgtgttcggctgtccgtacgaacagaacgtgccggtagaacaagtcatccgcctgtcagacaccctgctcgaaatgggtgttgatgaaatatcgctcggcgacacgatcggcgcggcaaaccccttgcaggtcatagccgtgcttgaagcccttttgccgagaattcccgcctcaaaaattgcactccatttccatgatacaagaggaacggctctagcgaatatcattcccgctcttgatatgggcatcacatcctttgatacttcctcaggcgggcttggcggctgcccgtacgcccctggatcagcaggaaacgctgccacagaagacgtcatttatatgctcgaacaaatggggattgataccgggacggacatgaataaacttctttatgccgccggctggatcgcggataaaataggcaaagacctgccaagcagaaacctgcaggcattcagaacgaaatgagaaaggagaagccatgggagattgcgtcttgtattccgtctgtcaagaaacgatcggtctgatcacgctgaaccgcccgcatgcggccaactcgctgtcttcagacatgattgatcatttacagcgtgtgattgaagacatcaaaaactcgccatccattcgttgtgtcattctcaccggcactgggaacacattttgcgccggtgctgatttaaaagaaagagcggggatgaatcatgaacaagttaagcaaagcgtcaggcgtatcggtgaaacggccgcatccattgaagctctcccgcagccggtcattgcagcgctgaacggaaccgctgtcggaggaggccttgaactcgccctcgcctgtgatatcagaatcgccgtcagccgggcgggcctcggccttcctgaaacagggcttgcgatcattcccggagcgggcggaacgcagagactgccccggcttatcggccccggcgcggcaaaagaattgatctataccggccgaaggctttctgccgaagagggaaaagacatgaagctgatcgagcatgtttgtgaagccggtgaacttatggaaaaagcaaaagcactggccggccgcatcgccgctaatgggccgatcgccgtcagacaagcaaaatccgcgataaacaagggtctggagacagatctcaatacaggactcgaaatcgaacgaaaagcatatgaacaagtcatccccacacttgacagagaagagggcctgcgcgcttttaaagaaaaaagaccccctgaatacaaaggaaaataaaacatggagggactcggatggattacgaaaaagaacggcagacacgcagcaaaacgattgaaaagggaggagccgcgaaatatcacgcaagcaacgaaaagaagggaaaactttttgtaagagacaggctgaagcttttattcgatgacggcatatccgttgaagacgcttttttcgccgagtgcatgtcagacggactgccggctgacggggtcgttaccgggatcggaaccatcggcggcagaaccgtttgtgtgatggcaaacgactcaaccgtaaaggcgggctcgtggggcgcgaaaacggtggaaaaaatcatccgcattcaggagacggcggaaaagcttcagtgtccgctcttgtacttagtcgattccgcaggtgcgagaattacggatcaggtcgacatgttcccgggcagaaggggagccggccgcatcttttataatcaagtaaagctgtcgggccgcattccgcaaatctgtttattgttcggcccttccgctgcgggcggcgcttacattccggccttttgcgacattgtcattatggttgagggcaatgcatccatgtacttaggttccccgcgtatggcagaaatggtgattggcgagaaagtatcgcttgaagaaatgggcggcgcccgtatgcattgttccgtatcaggctgcggtgatctcctcgcccggacggaacaggaagcaatcatgatggcgcagacatatctcagctactttccggcaaattatactgaaaaagcgcccgtcaacaaatctaagaacccgaaagcttttgaaaaaccgctctcagatgtcatcccggcacatcaaaacgcaccgttcaacatgatggatttaattgaacgtgtcattgatgaagactcattttttgagattaaaccgttatttgcgcaggaattaataacggggcttgcgcggattcacggacagccggtcggcattatcgccaatcagccgcgtgtcaaaggcggggttttatttctcgattcggcggataaagccgcaaaatttatcgctttgtgcgacgcattccatattccgcttctgtttttagcagacattcccggattcatgatcggaacgaaggttgagcaggcgggcatcatcaggcatggcgcaaaaatgatctccgcaatggcggaagcgactgttccgaagctttccgttatcgtcagaaaagcctacggtgccggattatacgcgatggcggggcctgcttttgaaccggactgctgtttagcgcttccgactgcgcaaattgccgtaatgggtcctgaagcagcggtgaatgcggtctacgcaaacaaaatcagcgagctagcccctgaagaaaggccggcttttattcaagaaaagcgtgatgaatataaggaagacattaacctttaccggcttgcttctgaaatggtgattgacggcattgttcctgctgattccttgcgggaagaactcaataaacgcctcactgcttacatgtccaaacaactgacattcacacaccggaaacaccccgtatacccggtataaataaaaaaaagactgcatagatccggctcgcagccgttcttatgcagtcttttttcatagtcttgatctcattttcttcacaacaaaataaacaacaataaatacgagagccaatataatgatcggagttgtatacattccggcatagctgtctacgtctttccactgtcccccgagctgatacccgagataaacgaaaatgacagaccacggaataatggcgagcgtcgtcaatatgacaaacttggaaagaggcattttcgcaaggccggccgggatggagatcgcatgtctgacgaccgggataaaccgcgccgagaacacaacgccggcgccgtaacggcgaaaccagttttccgcaacatcaacatgatgctttttcagaagtaagtacttgccgtacttgtccaaaaacggccgtcccccataacgggcgatccagtaaataaagcactgcgcgatcgttcccccgatcacaccggcgacaatggcgccgataaagctgatcgtgccttctgacaccatatagcctccgtaagccagaacgatttcactcggaatgat
